United States Patent Application Publication US 2019/0183130 A1 - sequence listing, part 21

SEQ ID NO: 2 - DNA, 21303856 bp, Cryptococcus oierenis (residues 19,367,151-21,303,856 of 21,303,856)
ggtagcacgaccccgatcgaaaacacacacaaaaacgacactcacgatgcccgccaccgctttcgagaccgtctcccagatcgcctcgatcctctctacccacctcgttgtctcctcggctctcccttacaaaaacgccgccgcctcgtcgtcctcgtcgtcgtcgtcgggatgcaagatcaccaaactcttcccccacgtcgacccggcctcgctcgtcggccagaacaaatcgtctacggatgaattgacgacgctcctcctcgcacctacctcttcctctctctcttccctcctcccctccctgtccaccctcgcctcgaccccgctcgtcgtccacctctcactcccccgttcagccgacctgggccccgtactcgggttgcgtggatcagggtgggtcgtgctcaagagcgagaacgaggtggaagccggggacggagcgttgttggctagcaagttggccaaggaggccaagcgggccgtcttgcacgtttacgccgccgacctcgaggtcgagggtaccaatggacactcgaacgggaatggacataccaacggctcgtcctcgtcctcgtcgtcgacgctgccctcggaggaagagatccgagcgttcttccaggcagagacgatcggtctgaacggggcctcggcttcgcacgcttccgtcatcccccacgtcgggcaacacttgaacgacgttccccagtccgatgtcgaccttttcaccgcgtacgaggccgcctcgctggccacgctcaaactcactcggagggcgcaaaagcctttccactacaccgccccgaggggaggtaacgaggctcgagtcgccgtcgtcgtctttggtctacagacggccgatatcgtcagcctggcacaggacgtcgagggggaccacatcggcgtgttgcaggtcgatctcctccgcccgctcgcccccggtcgattactcggttccctcccggcttcggtggaaaaggtcgtcgtcctcgaacaggcatttacgaaatccactcgatggggtgccgtctttctcgacgtgctcagcgcgttgcaagccaggtccgaagtggacgaatcggccgagatgccccaggtgatcggttgcagtttgggtcagctcgacgggtcgtctgatctcgctcgtgcattcgccagcgtgttgaagggggaaagcgacgtcctcggttccatcccggatgcgaaccaggtcaccgtcaaggcgccccacgtgccccaggtggaagaggtctataccaacattctcgatcagactttccccggtcggttggagattgccaactctcccagcctcgtcccctcgctcggggaactcgccacccggcccgaatacgcgtttgggaaattgtcggccttgctggacgaacgcgatgcgctcgccgaagccgtcaagcagttgttgaaagaggacacgacgtccgagaccctgcacaaggtcgccgccaggtggttggtcggcaaggatggcaaggatagtaaaaagatcgagtccatgggtcaggacctcgtccgtgaactctcggcagcgtccaacccctcgtccagcgtctcgaaggctctcgagctcaaggctcacgtcaagcccgtctcgaggtggatcatcggatccgacgcttggtcttacgatctcggctcgtccgggattcatcacgccatcgcctcgggcaagaacgtcaacatgctcatcatcgatacccagccctacacgactcgggggagcaaggacgctcagaagaggaagaaggatatcgggttgtacgccatgaaccacggagacgtctacgtcgcctcggttgccgtctactcgagttacagtcaggtgctccaggcgttcgccgccgcagacgctttccccggcccttcgatcgtgctcgcctacctgccttatggacaggacgagagcgctaccgccttgcaggtcttgaaggagaccaagctcgctgtggataacgcctactggcccctctaccgatgggatcccagtcaagaggacgtcgagggcgggaaaccgttcttgctcgattccgtcagggtcaaggaggccatgaaggatttcctcgatcaacagaaccacttgtcccagttgacggcagccgagccccagatcgccaagcaggtcgtcgcttcggtaggaaccgagatcagggacgccaggaggaaaaaggccaaggaggcttacgaaaagttgatgaacgccatggacggacctcctctcttgatcctgtacgcttccgacggaggaaacgccgaaaaggttgccaaaaagctcgcttccagggccaagacccgaggacttgccacccggctcgtcaccatggacgagtttgcgttcgacgacatcaagctcgagggccacgtcgtctttttcacctcgaccgcaggtcagggtgaggcgcctcagaacggtcgaaccacgttcaaggccctcatggccgctggtgagaacggcgagtgggaaaacctcaactttaccgtgttcggtatgggagattctcattactggcctggcgaggatggcgccaagtactacaacaagccggccaaagagattgacggcaggttggaaaaactcggtgccaagcggatggccgacatcggtttgggtgacgatcaggatcccgacggtgcccagaccgggtacaagatttgggagcctctcctctggaaggccatgggcgtcgactcggtcgaggtcctcgaggccgagcccgagccgatcaccaacgaaaacatcaagatcgcttccaactacctgcgtgggaccatcctcgagggtctcgccgacaagtcgacgggagccatcgacccctcggacgctcagttgaccaagttccacggaacctacatgcaggacgatcgggacattcgagaggagcgcaaggaccagggtctcgagcccgcctactcgttcatgattcgatgccgtatgcccggtggtgtctgcaagcccgagcaatggttggccatcgaccagatctcggatgagcacggtaacgggacgttcaagttgaccacccgtcagacgttccagttccacgggatcatcaagaagcacctgaaacccgccatgcaagccatcaacaggaccttgctcgacacgatcgccgcgtgcggtgacgtcaaccgaaacgtccagttgtccgtcaacccgtcctactcgaagctccacgagcaggtctacgacttttccaaggctctttctgagcacttgttgcccagcacgaccgcttaccacgagatctggctcgacaagaagctcgtcgcgggcgaggccgttaaggactttgagcccctttacgggccatactacttgccccgaaagttcaagatcgccgtcgccgtccctcccgacaacagtgtcgacgtcttcaccaacgatgtcggtttcatcgccattaccgacgctcagggtgaactcgccgggttcaacgtcaccgtcggtggaggtatgggtgtcactcactcgaacaagaagacgtaccctcgattgggagacgtcatcgggttcgtcaccccggaggaaggatgtttggttgccgaaaagatcatgctcagtcagcgagacaatggaaaccgagccgaccgaaagaacgctcgtctcaagtacacggtcgaccgtatgggtctggaaaacttcaaggccgacgtcgagaagcgtctcggtcacgctttggagcccgctcgcgagtacaagtttgagcaaaacgtcgacaactatggatggatcaagggtcacaacggcaagtggcatttcaccatgttcatcgagaacggacgtgtcgaggacaacgaccgtcatcagttcaagacgggtctccgagagattgcgagcgtgcacaagggcgactttaggttgaccgccaaccagcattgtatcctgtccgatgtcgccgaagaggacaagcccgagatggagaggttgttggccaagtggaagctcgaccagatcgaccactcgggactccgcctctcgtcctcggcctgcgtcgctttccccacctggtgagtctgccctcgagcgtgttgttgtttgtctcgtcttttcgcatactgatgcacccccgtcctcgtagtggtctggccatggccgaatccgagcgatacctccccgtcctcgtggacaagctcgaaaaggtgtgcgaggacgctggattgcgcaacgactcgatcgtcatgcgaatgaccggttgccccaacgtgagtcgcccccgtgtcctccctgcacccggatctcgtctcatcctcgccttgctaacctcgtcctcgtgtctctttcctctttcttccagggttgcgctcgaccttgggccgccgaagtcgcctttgtcggaaaggcccccgggacttacctgatgatgctcggtggagggtactacggtcaacgactgaacaagcccttcaaggagagcgtgaccgagcccgagatcatggagatcatgacccccatgatcaagcgatacgcgctcgagcgggaggatggtgaaaagtttggagattggaccatccgggccgggtacgtcaagcctaccttgtccggcaaggagttttacgacgattccgtcctcgcctgaggggggattaccctgcagcgtacttgtatagatagcatcgaattctggtctttccggttcttttctttccatgttttctttttcctgtcattattttgtaacgcgatgttatccacaattgcaattgattcgaggtggtctcgttgtctcgtcgtttctccgagaaccgaagcgacgtctttggcgcggcgcggatgagaccggggggcgggggcgcgagagaggtagaagagtcatcccgccctggatcaggtggtgtagtgcgacgattgaacgtgtgggaaggatcgtccaagacgactcgtaaagcgcagtctagatggaaggatcgagatgcacgtctcgtctggttcatttgaatgtgtgtgtgtgagtaggtggtaggtatagagagagacggggagagctgtgatcggatgtgacgggtttgaccggtggatgacccatgtgatggtgttgtgtgatctgtgatggattcaactttttccccgcgtgtgactctcgaaagtaacaatgttcagtcgatcaaagttcagttcactcactcgtccatccccgtattgaatcatcaaccatcaacatccatcatcgtcgacacacctagatacaatcagactacacttactaccgtctcacaactcacctcatctcctatcaatccatacgacgacgagaggtttcgtcccttgacattaattgcaaacctttgcacccccttgacctcgcgcccgtttcgcacgatccgatccgtccatctctccgttggatggctcgagtcgccaataccctcgtgcccaacaccgccaccaccaacgatagtcaccagtacatggaacacgtcgatcactcggacaacttttcatatgaacagagacctgaagagaatgctatcgatacaaagtacattgaacaacatgtgcaggacgaacatcaccgaggtggtcagggtaccgacgacgacgctgccgctgatggtgctgccgtcaacgacgacgacaacgtcgaggaaccgaggcaacccgtctcgatcgtcgacctcccacccgagttgatcttccacatcctctcctttctccccaactctcgactcaatatcaacccgttgatccaatcaccacacgccacggccatctcgttgccacacgatgattacaataccaacgccaatgtcgacccagagtatcacctccgtaccgaactcctcgacccgacgccgtattatccggacgctcagctcgtccagaaatccctttacgccgtgatgaggacgtgtaaacggttctacgagatcgccaaggccttgatgtgggtcgacgtcgtcgtcaagggaggtcggggttggatcagcgtcgtcgaagggttgggcgagtacgtgggagaggtctggtacgacgtcgccgcgtcgagggcgaggtcgatggtcaggcgttccagtcagaagtatatccacgatatgcaacagcaacaacaacaacagcagcaacatcggggggtgggagggatgacagagcctgctcccctgccctcccccccggttggccctcagctgctcgcgcgccaaaacctgctgattcctcgtcgtcagtctctggcatgtctgtctgtctggcccggtaggtagctaggtagggaagtagccaacaatcatctgagtcgacagcaaccactccgctatctagctacgcaatttccttgtgaccttgtccctcgaactgcaactgcgaggaaatcgacaacccctatctctcggacgtttagcgacctcggttttgaccatcgccttgcttcaagcacgtccggatcgtttggtttcgacaacaacaagcaacaagttttcctacgacatacacacacacaaaagtgaccaaacaggcgttcactcaaagggacagctgggcatcactcctttctgggaaatagcgatagcttttgatcaatctagatcgaactttaagggtcttcacatcgactgatcagtctttggacaggatcacgacagttggagatttcacatcgaccatgtcgttccaaccgtcagagcaagctcttcaagagcttattgtcactctcaggggttccacgaacccaagttcggaggtgcaacgtcaaactcaagaggtcggtcaatagagttaccgcgacggcagccgcctgtacagcggcgtcgcataggctgctagttttactaaatcatacccgatgtggtcgctctgtacctcttgttttgcatcataatatagcgactagaacaattctccacgcatctccccggttatctggcctaccttgcccatattctcatccaatgctccaccgaggatgataccacccgatctgtggctggtctcattctgaagaacgccattgtcaggccattctcacccgatgccgaggttgtcggcatggactatgtcaaatcgatcgttctgcaagggatgagggaccccaatcagaccgtcagacagacggtggggaccgtcatcgtcaacatcatggcgagggaagaagacggcgcttggcccgagggtctcgaagcgttgatgaaggctgtcgacagcgctgatcccaacgaacaagaggtaagcggtcgtctggcctgactcgtttgtccgttccgttccgagctgacctgaaccgaattccaaattatgcttagggagctttcaactcgctgcaaaagctcgcagaagactgccccaaaaaagtcgattgcgagatcaatggtcaacgaccgctcaactacctcatcgagcgtttcttgacgcataccgagcatcagaacgcccggatcagggtgtacgccctgacctgcctgaaacactactaccagcccaacgttcaggccatccaggtacatatcgacaacatcatcgcggccttgttccgacgcgcttccgacgcttccccagacgtccgcgctgccgtctgtcagtcgctcagtatcctgctcaacgtccgtcccgacaagattttgccccagatgagcaacgtggcagagtacatgatctactcggctcaagatcaggatgaatccgtcgccctcgaggcgagtgaattctggttgactttcggtgaagacccctcgatggtcgaccagctcaggccgttcttgccccaagtcgggcctctgctgttgaacgggatgatctactctcagagcgatctggactggctcggcggtgacgaggaggaggacgagaacgtgcccgatagggtcgaggacatcaagcctcgattttacggaaagacgcacaatcaagaacacgccgagaacggagcgcccaagccggcccccgcgcccaaagccgatgaggacgacgagagcgaatatgcggatgacgactatgacgaggacgacgaggatgatctgcaaggcgaatggaacttgcgaaagtgttccgccgccgcactggatatcatggccgtcagctttggagatgaaatgttgaccgtcttgttgcctcacctgagggacaagctgttcagcactgattggctacaaaaggagagcagcatcttggctttgggtgccatcgctgaaggtgagatacactgttcaggaatgacgacaagtgtcgtggctgattcgtcatcgtacggctcgcaggatgcatggacggactcgtccctcatctccctaccttgctgcctttcctgatcggtgcattgtcggaccccaaggtaggttcaccttgcgagtcgatattagcaagatcagccgcttatatcgtctgtttatagccgttggtgcgatcgatcacatgctggaccattggccgatactcgagctggatcgttgagcaggtcgacgctggaaacggccgtgacgcctactttgtccccgttctcgaaggagtgagctcaagtgggtatcgatcgcgcagctatcgcatctaacacgtcgttcttgtagcttttgcgcatgatcttggaccccaacaagcgagttcaggaggccggatgcagtgcctttgctacgctcgaggaagaggccggctccgtcttggagccttatatgcagccgatcctgcagagtctcgtagccgcgtttcacaagtaccagcaacgcaacttgctcatcctctacgatgccatcggtaccctcgcggactcggtcggatccgctttgagcaaggaggagcatctccaggtgttgatcccgcccttgatgcaaaaatggctctccctgtccaacgatgacatcgcactcgtcccgcttctcgaagtaagctatacttgcaggcagtgtcgatgtgctagctggacgctgatgatcgccgctatagtgcctttcttctgtcgccattggagccggagtctcgttcgctccttatgcccctggcatctttgagcgatgcttgcaaatcatccagaaggagctgcttgagtttcaggaatggacgcaaagccccgaagacagcgaagagcccgattcgtcctttgtcgtcgtcgctctcgatcttttgtccggtctttgccaaggtctcggcctgaacattgtcgaattggtcaacaacagcggcaactcgatcttgcagctcatgtcaagttgcttacacgtgagcatcgcatgcggttggaagacgactgagtagctaaactcatcatgactctttaattacatcacagcacccggaagacagcattcgacaatccgcgttggctcttctaggagacatcgctatcgctgccttccccttggtccacccccacatcgccgagatcatgcccatcgtgatcccgcagattttgaccgatccctcggacaccgaagtcagcgtatgcaacaatgctacctgggcagttggagagattgcattgcaattcgctcaagacggtacgccatgaaatgctctcttccacatgactacgaggctaatttcacggttatcctggacagcctcgcaattcgagcctttcgtcgctcccgtgatggatcgacttgttcccatcctgtgcaacccgcgaagcccccgtagcttgagcgagaatgccgccgtcaccatcggtcgaatggggctcatctccccgacgcccatcgcccctcaccttgcgcatttcgcaaaggcctggtgagtctttgtcagaaggtttgccgtgaaacccgcctgaagcgagcacatccgcaggtgtaccgccctttgggaaatcaaggataacgacgagaaggactctgctttccgaggcttctgcatgttgatccaagctaatcccgccggcattcaagaggtatgtgatctgctagcgtgacctgcaagcgtcagctgagcgcccctaaatcatctgtcttgttcaggactttttctggttctgcaacgccgttgttaaatggcagacgccttcggccgaacttgacgacatgttccgaaaggtcagtgttgcctgtgctacctttggaaggctaaaagacttgccgctgaaccgatcatccacccatacagatcctcggcggattcaaacagatgatgggtgaaaccacctgggcccagatgaccgccggttggccacctgctctgcttcagcgtttgaacgagaagtatggtgtctaagctcccaatcaacggacgacacgcgggaacagttcaacacttttggcaatatcccggcttcccggcatcgacatccttctgtcgaacggcacgaatagacttcccccttcacgaccattgcgacgaaaacgagctggcactagtcccgtgacgtggagactggcgtcctcggtgcatatctggtttttctgatttcattgtatcctttagcagtatataggtagatagcttcctcatcaggttggaggcggcgtcctcttgccgtcatatcccggcctcgtctatagaccactagcatcctgactcgccccttatgggctcaggcgaacccaaacccattccgtagaacatccctgcttacaacaggaagtatatcgtagacgaacatcaagtagattagagcatcacgtcatattatgggcacgaattgcttccggcactacgggctggtccgagaccgatcgagcatgcagcctgtagcttcgaacttcgacgtcttggttgcgcttcctttgcattcgctgtatatcactatagctatatactttactagctactggatctcccgttggtgtgctataaaattgtcaccgtattgaagggctttcgataactctttctatcgaagtagctgtgcatcaggaaagattgtcgggataacccactcaacggattgtacacgcaacgctacaagaacgtagaggacaggtcgtagcgcaatgtctgggtcaggtaagatgcgatggtcacggcggtcttgtatctcgctcaaatgaagtcatgcaggaaggattgccacacaatatgcatcggcggcgaacgtacccctgatcaaagctcccacgctctggttgccaagaccggtgagaatgctcgccacaggaggattcaagaatgttaagctcagccatacatgcttgatttgcttgatcaggtcacaatgccagatgacgtgcatcctcttccggatgatataggagcatatgtgagtcaaatttcatggcatagttcgctgccattcgtgctgagaccggtgggctaccagtttgtatacccttttacgctcgagccacacatcctcgctcagtcgcctcccgtacatgaacggatcaaagctcaacgtgccgaaaatgagcaagtcttgacagaacgtatcgagcgagcaaagcgagaaaagtgagtcgaaattcctggttctggacctcctcatgggcagggacttacgatcgaaagtactcatcagggctgaacagatgaatcggatggctccaggttggaaccctacgtccttcttgacaccacaacatttacaagccgcgccgccatcatcatcttcaggaccctcttctacagtctcacagaacaaaccctcgacagaggaagaagatgcagacgccgctttcaacagcttgaagatcacatgacgaggaaagtgttgtaatcgaaatccattgacgtttcggcactgtatcggtcggaccagaatagtatataccatcaacataccaacgaaggaccatgctatgtcgacgagcgacaagggcaccctctggctctggagccgatttgcttacaactgtgtttagttaaacggaatgatcgaaagcgagacctcgacgcgacctttcctcagttcgacggcgccagtgctttcctgacatcgtgtcattggatatatagcacgatagggtcacctatgtattgaagttgatgtttgcagcattgcgcattgtcgttcgagggtcgttccatgtgctgaaccggctgccccggagcaattcagatcggcaacgctttcaagttcgtgattgaatcgaatgtgagcgcgtctcaaaccgcaatcagcttaaattgggcgatagcaggcttcaagacgctcaaagggctcggctttacccattttacctcttacaatcgctcggccatcgacttccatccaaaccagcaggggttacgtacataccctctgatccttccaaacatcgattctcagcgatggaggacaacagcttgcacgaggcgctgaacgtgtagggggtcataacccgatattgaatggctggaccgacctgacggatccttgcgtactaacagatacatctctgatgacgcctacgtcttcgaaccgaacgcaatccccaatgctgggatctaccctggcgaaaagacccaccgggagaccatgacggtcaatcgcagatcaggagagatcaccctgaacggtgagcgaaatgtttgaaacgatcttttgggacgtcctggcctcgctcaaccgtacttgtctctagctcccaatgctggtgctcccctcggccgagagaaggtcatcacctgcttcggtgtcgtagggattgtgactcttgctacaagttcgtgactgggttaatcgatccatttccatctgcgccgtttgctgatcgataggtcaactcgcagccgactttatcattgtcatcacatccaggacgccatcttgccggctcctttcgcatcccatctacctggcgaacgacttccgtctactccctctgtccaacctgagctcttctcagtccattctcgacaaccccgtcgagcgagagctggtgtccctcgttgaacaggggctacgagcgggcaggctctggttttcctatggatgggatctgaccaacaccctccagagacagcaagatctgcttgaagccggtcgtagttcagagcccatgtggaagaaggcagatgacaggtttttctggaacaagcacttgatgtccaagttgatcgagaggaccgagttgggaggaaagcagaacgatgtgagcctagcatgtcggacgcaactactacgcacgtgttgacgtcccagctccgctatgtcatagttgagccgtttcatccttcccatgctcttcgggtgtaagtccgaatggatcaaggctaagcttcctggtctagcaagctaaatcagacacgcaatcagctgtcgaacttcgttcctcgaccatcaacaaccacgacattcttttctccctcatctctcggcgatctcgctaccgagctgggactcggtactttacccgaggcatcgatacttcgggacatgtggccaattacaacgagactgagcagatggtactgactgatcctatcaacgtcgatcctcggaccggctttgctatcggagggaacgggcgggtggaaggaaaggaaaggaacagtttcgttcagatccgaggcagcattcccctcttctgggccgaagtcaataatctgagatacaagcccgatatgcaagtaatggatctgccagaaactgcaagtccatcgcttccgccttggccatgcgggttctccaattgatcagtcgcattttttacatcagatcgaggccttgaagctccacgtcgatgagcaggtccgaatatacggagacacctactttgtcaatctcgtcaacaacaagggacatgagcttccggtcaaggacgcaatggaaaaggcgctaaaggcttgcggagagcccaaggcccattacgtctactttgatttccaccacgagtgccgtgggctgcgattccatcgcatccaactgctcgtagacgctttgcatcaggatctggctcagatgggttacttccacatcaacgtgggcggtgacgcctctacagccaagccaactcaccgacagaccggagtcatccgatcgaactgtatggactgcttggatagaaccaatgtcacgcaagccgctcttgcaaaggacgctctgcagaggcaactgcagagtatcggtgtattgtctcacaaggaaaaccttgatgatcacgccgaattcacccacgtgttccgaaacggtaaggcgttattgtttcgtacttgttacacctgacagtacgactgaaaacgggcacatcctacagtctgggccgaccatgccgacaccatttcgaaggcgtacagtgggaccggtgcgctcaaaacggactttacaaggactggtcgtcgaaccaaacaaggggccgctcaggacggaattaatagtgtgatgcgatacgtcaagaacaacttctttgacgggagccgacaggtaggccttcaaggtgtcacccttgactttgacgatgaaccgaagctaacgggctgtagcggtatcttcgcaggatgcttacgatgttctgacaggctcatgggtcgccaggcgaggtgccatcccccctctttcggacactcggccgttcctgaccaggatggtgaggcccttgtgattcgacgctcatcgcactgcgtactgacgagcaaatcgtacgctcctatgcagatgccttacattctcggctttgccatgttcatgatcgcttgcgggattgctctgcccaaggctaccggtgagtcgagccgatccagcagattcaaggagtatcgcctgacccccagatcgcatctcagaattcgccttgacctcttacatcttcttctgggtcgttctcgccggtcttgcggcctcgtacatctgggctcacgtaggtacagtataccttgccgacgatgacacattaatctgaccagccgcttcttgatagggaacttcgtacgtcaactggccccgccttaacgcgccctacgacatcctggcgtacaagggtcccggtttccggacccccagtcgaggtcgcggtgtagcaatggcctggaaccgcaaggtccgacaagaggcgggtgcctctggctcgagaaagcccagacccgaagagatcgagatgggcaggaagaaggggagtctgatcgactgattacaggagaagctcgatgcagtgcacgatctatagagatatcggcgcaatgtagacgtccggtctgatgccagtatgcaaacggcttgttgaaaccgacggacgagtgactgccgagtcgttgttcagttcgcggacgaggcatacgcgagcctgccacagaccggcctaaagtcaccctgagacttctgcgttcttgcttgtcaacatactcccgagctcactcgcaagtcaggatcgcgatcatctatgttacgatcgcaggaatacaaatgtgaaccagacagctgacgaggcgaattgtcgacaaggaaaggaaaagaaagatggtaggcgggggtatgatacgatacaggcggcctcgagagcggatttctcgaggaaatgccgggatgtgggagtctcacgttgagaaagggacttatagttgaacgcctcggggatatctacgatgcaccatcatctgcaaaagagatcccgcgtacatcccaacgcaggatcgggtcagcctcgcccaggagcgtcgaacggcttcacagtacagctacctacctggcacccgcagaatacgaggaaagcagcgtagacaaaggcggccatgtagcaaatgtgggccacagagtcagggttttcgggatcgtgcgtcgatccggtgagtgcttcggtacgcccagagaaggccagtccaaacttgaggtggggaggagaagaggcgtataaggtgggatcactaggttcggagctcggtcaagtgaacggggcttacaactgtcgggaaagggtgaagcggagcgtgggttagtcaggaatcgtcaagacgggatatcgtggaagggttcaaggcttaccagtcaggattactactccgaataccgacaagacagtacagcatccagctgccgtaataaggacattatcatttgacgtgagacaagcgcaaccgagccgatggagccgtccaggtcaggcggagagttgttggaagcgagcagtggtagacaattgtaactcgatcaactcgtgtagtgttacgacctacgatttcatcaacgcttaccgaggggagccgacacgacgggacgcattgcaagggccattttcgtgaaaggtgagtctagaacgtagaatgtatcagactattgtgcaatgctggtgatactggtcgacgatgatagcttgaccgtccttgaccataagtgccgcgatgagatgaggttgatggcgatgctgctgatggtgatgatgatgatgacgacacggacattccactgtttttcattcaatgctcgggcgcgcgcgtgtatgtctgtgtttcgatgtccgcttctctctctctcactttcccccgcggccgcccgttcctcccgagatcgtcctcaccgtcaaaagttggtcgatgttgtcgatttcgcaagatcgagatacggtcgagatcgttataatatcggatcatctcattcgtgtcatctacatctataccctcacacctacgacagtaaacagaatcacttggccaatctagacaatcaatagatcgatcaagaggttacgaaccgatcgtattgcaaaggacaaaaaaaaacgattcgacctctactgatctaaacacgacttgtggaaaccacaatgtcgactactgtagctggctactcggccgcctttgctcgacaactggccaggcaaaagaacactcggtcaagcatccgttgttcaagctcgtggaccgtaacacgctcggccagcacagcggccgctccttcaccatccgcatcgacccaaccccatcgtcatgaaccgtccacatcagccacgtcaaaggcttcgagacccagctcgatgctctcggctctccctggcatctcatcagagcttaccaatctgaaatcatccctgttccacctcctcggatcttctcatccaagtttagacgccgtagcaaaatattactttcaggcggagggtaaacatcttcgaccgatgctcgtcctgttgttggcccaagccacgaacggaatgggaggtgccgcttgggacgacctgttggccaaggaaagagaagaccagcggacaggcagaggagtcgatgagagcttgacgagcgtcgagggcgtcttgaacgactggaacccagagcagatgggcatggaaggagaggccgacatgatctttgccgagccatacgatgcgacggcagatcgttcgggagagagacgaccgggaagttcttcttcgtcgtcgatcaagaaatcgcttgcgagcgcgctgctaggcgatacctcgaccggatcggcctcctcgtcttcactcgctggtggtctcgattcgatatcacccatcctttcgacacaacgacggctggcttccatcaccgagatgatccatgtggcttccctcctccacgacgatgtcattgacacctcccccctgcgtcgaggtctcccctcggcacctcaacaattcagcaacaagctgtccatcctcgccggagactttttgctgggcagggcttccgtcgcgctcgcccgtctgggctcgaacgaggtcgtcgagctgctagccaccgtcatcgccaacctcgtcgagggcgaagtcatgcaacttcgagcttccccgaacgggtcgaaagagaacaagccgagcaaggaggcctttgaggtgtacatgcggaagacttatctcaagacggccagtctgatggccaagagcgccagggcggcggtcatcctcggaggagctgggcaggggtacggacggacgacgagggagattgaagagggtgagaggttgaaggatatcgcctatggctacggacgcaatctcggaatcgctttccaggtgggtttgatggcgttatcaatcgatggggaacttaccactgactgatctgaaccttgtcgcagcttatcgacgacatgctcgatttcctgcccccctcgcctgagctcggtaaaccgggtctcggtgccgatctttcattgggattgacgaccgccccatcattattcgcctggcaattcaacccatctctcggccctctaatcgcacggaaattctccgaaccgggtgacgtcgaacgagctcgggaactcgtcacccagagcgacggactacgcaagacccgcgagttggccgagaggttcgcaggcgaggctaggcggggcgtggagctcttgccagagagcgaagctagggaggccttgatcgcattgacgaaaaaagtcgtcgagcgcgtagcatgagcaagaacgagatcggtcgaggtggacggaatgaagatcgaacgataagtagaacgtagatgaagtaaaagattggcctgcccgcgaggggtcgatcatgacgcatactagacaccccccgctctgacagttgtaaggatactgtctcttgcatcagacgagtaatacatgagaattcgaggacacgcgaccttccaatgcgccttgcgatcggttcaatggtagcgagagttcgacgttcatggacgggccctgcttgaaatatctcgactgccctgtccactttcatggcggttggactttgggagcaagcgacacatactgttgacattgtaccgatgatacagccgcatcgatcaatacgcagacagaagcttggtgcatttcaatcccttcacaagtcgaatccgccaaaagtcgtcagaactatacagtccggcaacgattgccgaagtcagtgaggggggggggggatccataacatatttcaagcgaagccggtgcgtagggagaagccataaagtggtatcggggtgagttataaccgcaaacattgcttgatgtcatgtccaggcactgcctaaattgtacgcccacccaatcgtcggtcgcgcttctggaccagccactgtacccggataccgagtctctcagattgtcgcagtgtacgcccacaactacctgagcccagactgaaacgaactctgaggtgtatcacgccaaggctgtgtatgacatcatcgagctcatcggcgtaaaacatccgcagtcgctgatcccgcgctaaggatcgaactcgtctcctggctttcctttctctcgccatgctccggcatcgactcggcaggtttcctcccgacgatcgtgtgcgaggttcatagatcgtcccatatcagaagtctgccggggcaggtggaggcggccgcctagttccattttggccaagatctaacggcagacatgtgccccggcacaagaaattccctgtcgaaacgcttggatcgatcaaagccgttgccgggacttgtctccctcgccggttgcctgagcctttgccctgcatggaccgatctacggagggttagtggcaacaacccctcggcggcgatccatgagtaatgagtagtaatctgcatatatacctcggatcatcttttggttcgtgcgaatcgacacgcagagatgccatctgccacaattctcgcctctgtaccgaccatacttgaccgacctccaaacatcacataagcacgactcggttctttccataagaacacagacacggcagaaagcgccatccaaccgataaattcactacgatggcgatggacaactatgggtaagagaatctttagccgaacattcgtcccgatcgacattctaatggatatacttttccttctcagatggttcgtagtcatcgttgttgcacttgccctggctctcacaattgtcggtaagtaataacaccgtcacacccttgttcgaggctaattcccaaccaaacccaatcgccattgtaccttcttccccacagcccgtgtgatgctttacaagaagcaccgcaaggcagcccagctcgccgcatcaagaggcctgcctttcccggtcatgaccgacctcccccctggtgcatggcgaccatccgcagccgatcgaccgccaggatcagccaggctgacacggggccagggagaagtggtcagggtggcgagccggacggatggagatctccccagttaccgtaagtctgcagccctgcgcaaggcttcgatcgtaagttacacaggctaacaaggcttgaggtgactttttgttttgctcgatgacagacgatcctggcattaaaattcctgaagcgatttacaacccagcatcttcccctgtcgtcgcgtcgaacccatcagcacaagcaccgccttccgcaccttccggcgcaccaccgggttatgacgatcattcgtcgtatggtcgtccgttaggcacacaagtttgagcgagaagaaggcaaggttatcgactcgtcggcgcactgaacaccgttttgtacaaggaggaacttcccccgctaccactttcatcctcataattttctcgaaggcaaggcatggccttagtacttttatataccagaccccggcatgtccacaaagctcgcgcaagcacgcatgacgagtaatacagatgttaaatcaatgtgcacgaaatcccaaagtgatagaccacatgtgtatcttgaggtaccacttttctctcagcccgtcttgttgcttccaaagatcttcctgtccgatcttgtattcactcgccacaattcagtgtgtagactgagcaagccacaacgcacactcaagtcacgtcccttttaccttcatccggcatggacatcgtgttaaccgaacggacgagtgaaggatcgttcacttgagatccaactttattaccaggtcccgcccgacgaacaggccagtcttcggcaaggggtggcgcggacggacgatgccgaaaagtgcggtgcggcgatctcctgcgcgggagcagccaaggacgtacaacccgaagtttccggagaaacagtatatcgacacccatactcgataacgccccgcaagccgagctgatgagatggccgcctgacagcatgtaggaggtggacggctccgtctcgtatatgagtgagctagaaaaacaggacttgtttcgatgcgcccatggggctggctcggcgtcgctacgttggtcctgtgcatcgcgtactttcgtcaaacccactacgacatatccaaagaccacgaacaatcggaaatggtagcagctagcctgagaaacgtcgtagtagttggagggtcatatgtcgggctggtgagtcggagcctcgagttcaaccggcatctgctaacatcatcgtcgacgttggacggtacagagcgcagctcagcaattggcagcagcgcttccagctacccaccgggttcttctgattgagccgcacagtcatttccatcacctgttcgctttcgtgagtcttcgcagcaaaagcaagatgtactacaccgtactcaccagatcctgcccttccagccccgattcgcagtagtcccggaccatgagcacaaggctttcattccctactcgcatgcattcaggcagcccaatatccccaacccagacctacaccaattcatcaaggccaaagtcatctcggtctttccgcaccatctcgagctcgatcgagaatggcaaggcaccaagcggatcgatttcgatcatctcgtcttggccactgggaccaagctgccttcccctggatcgatgcagtcggacgaaaagcaggaatccgtgggatacttcaagacatatcagattggtgtgaagaaggccgataagatcgtcatcatcggaggaggagccgtgggtgtacagatggccaccgatttgaaagaggtctacccggaaaagaccgtcacgctcgtccagtcgagaaagactgtcatgccccgctatcaccctcgattacacgagatcatcaagaaccggttcgaccagctcggagtcgacttgatcatcgaaaacagggtcgtcgtacctgccgatggattcccgctggatggctcggaattcgatgtcgagctgaaagatggccggaaaatccctgcccagctggtcatcctcgccaccggccagattgccaacaatcaactgcttcattgcctagactccaccaccgaggagcgcctaatcaacccatcgaatgggttcattcgggtgagacctacactacaattcaaggacccggctttagggcacatgtacgctctcggggatatcgcggataccggtgcacacaaggccgccaggcctggaatcgctcaagcggggacgatcaccaagaatatcctgagtgctattgatggcaaagaggtcgcagacgagatcgagatcggacctgcgggcatccatatgagtctaggactggtaagcttgcgggttaggcttgaagaagcggaggatttgcactggtcactcatgagcctcgcgtgacctcagactgataatctcgtcttccgcaatccggccaaagagggagaggaacccgtcgttatcatgcgtacagagtaagtctgaatcttcaccctcatccctttttgtcggctggtcaaatggctgacactagggtgcctcgctcggctcgcggtgttgtgatcgtttcagcggatcaagggatatgaatatcgagggcgtatggagtcgacggggggtgatcgtcaaaggtatcgaggattatcatctctagcagagagacgtagatgatgttatccgcgaaagggttgtactactacaaagcacggccgtcgaagttgtatgcagagaatactcgatcgagtacagcaacctcgaactatctcatgaactacaggtgagaagttgactgacgaagcgggccgtgtagccctggactccgaagcttctgggagatgtgacgacttgcctttgttctgtttcggatctgcggcgtggttggtgtcgtgtcaaggcaataaagggcctcttggatcatcgagaatgacccagcccgtccgcagagcaatcgtcatccctgttgctttcggcgggattctaccagcggtaatctgcccatataatcatggtcaacgcgacatgatccaatcatgcgttcaatattctctaggatgtagtgttgatctctctggatgttggaattgaaacaaggagcgaggagcgatgttgagctgccgagtggctagatgacattcccttctctcacatgaaacgcgtgcaagcgagattcatgccgggcaaaagtgaaggagaagaccaaattttggaccccgacaggaggagaccgggagacgacaacgcggatcgcttatgtagttcggactcatctctaatgatgatgtactccttaaagaagggaggagactgatgacacaaagtactttatctcgagcggaggcgagggggtcagggtgacgagcttgatgatcggatgagcgcgattgacggacgagcgagttgaactggatcgagagacgagcctggtgacacgacgagtgtgcgctgtacaatgctataggataggacaggtatatagagcacatgaaaaaaggccgtcctacgtattctgtgacggtctagtctttcttctcagatcgcgtttgaccaggatgatcggctaggccgcctaccagctcttacaatggataccttttcgacctgttcctcgacccttatcgcgcgtccggtcagggccggagtgcaggacgacaaggcgtccattgtaagagctggctggtggccggtggcctataccacgcaagctgcctcgatgacgacgaactcgacgaggtgaaacgacgattcccatgacccgactgttcggtgatgaagtgagtatgattggatgacgaccgggtgtgatgatgtttacgtggttccctcccgcttaaaacggaatccccgctggctgactcgttttctatttcctgattgaaatctcggcgacctccacatgatcacgtcgtcgtattgtcgtcgtcgtttcgcaagtcaagactcagactcgatgccatatcagccactaccagctaccagatcatattcgaaagggaaagtacctctcatatagctaccgaggcaccactacctacaggcgtagaggatcaagatgaaccggacacgcactcgaacaatagcgaccatgtcaccctcgaccacagcgataaggaccgctcgagcgataagccagcgacgcttcatttcgaccacggcccgtctcgaaaacccgcccgcacaggccgccagggtgagcgaagtcgaagatgaagccatggatctcctggagagcagagggatcgggatggagaggctcgtcgagggttatcagcgggggggatccgagtcgataggagggaattaccgggactacatcaaggtacgcgaatcacccaggtccaagtcgaagacagaccgtatgctgacatgatccatctctgcttggaacgccaggccaagatcgcacagcacgacttgctccacccggcaccactcacagccgcctcgcatgcaccacaattgggcgagatcctggacccggccgggctgacagcgagggcgaaagcgaggacgggacgacacccgttgacggaccgttataagcgggatcacggatatctgaggatcagtttgaccgagaggtgcaacttgcgatgtgagtcgaaattcgagcgaagtcccggactgtctttctcgcgcggaggggggtgcaggtggggatgatgatttcttctcgacctgggacaagacgagcagcaagcccgccgcgcctgtccctcagaaaccgacgacgaccggagttcccgggatcggcgtggccagacccgcttcgggaccgaggacggtgacgtcttcttcactccgagcggggagcgctggtggagccaccgcagcctcggggacaaccaaggcgccgtcgaggttgggcgctacgaggttgtcgtccaacacgtcgaccacgaccatgtccaacgccgccgggtccgctcctcgagctagcaagttgggagccaaacgagccgccgccccgatcaactttgaagaggctcaacgcaaggccctcgaggaagaggaacgcgtcaagcggttgggttatgataggaaaaaggaggaggaagaggccaaggagagggagaggaaagaggccgaacaacgggccagaaacgccgcggatagcaggagctcgaccccgctcggaggtgcatcctcgtcggcttcccgagcggtgcaggaaaaacccaaacccgtcaggttgggtttcggagcgacggcggcgacggcagcggccgctactgccgcttcagccggagcggccgtcgccacgaaaaagtaggtcgaggtcgagccgtgtcgatagactcacaactgactcgcaaacgtcgctcgctcgtaggtacgccgaggtcgacgagagcaattacgccgacaacagcaagtacagcaatcaaaagggtgagcgcgcgtcgccactgcgatatatcaactcgataaacgaaatgctaattcgcctgtcatcgctccgcgcccctagccatctcgtcggaccaatactttggacgagggagctacgatcccgccgctgcggccgaggccaagagccgcttgcaaaactttacgggcgcaaccgccatctcgtccaacgcctaccacggtcgaccagaggaagacgaggaggacaccctggccgacgagggtgggctcctgggtgaactcggacagaacgagacggtcgctcagctcgagagggggatccgtgacatggccggaaggttgatggccaacccggatgtgcaaaacttgggagagagcctgaggacgggtgcgctgagggtgagtccgatgtactgtggcttcgcaggagtggcccgaaggctcacgcagcgtttggttcgtccggacggcacagttcggagactacctccaacaaatgtcggaacagcgctgatctggtatcgggtgtcgaaactctatccaccgaatgtcaagcctggccctttttttccacgtaaatgattgatcgcttttccttctttcctgcttgtatacctgagcatcgctcgcgaaatcttatgacgacgtgccctgttgtttgtcgagtgtctcgtcaatgatgagctccgtcgatcgatccccgtacccggggttcacggtttccgcgaatagtgcgattttcagattgatgatggtccaaggctgtattgccacctggcgacgtctacagactatagaggaccatcgaaccaaatccgacgcacgcaagtttttcgaagcgcaagtttgtcatgcgacactacctgtataacagagaattgcgcgttgtgtatgccaataacaaagggctgcctaggcgcacgggtggtctccaggttcagcgattcacgcaagttgaatagtcgggagactgtcagttgtgcgccatccggcatatcgcccaaacagaaaggtcagctaaagtcgggggaaggcttgtgcgcgaggtgcacgaacgaatgcacaagggtctgatgacagcctgggctcgagataacacgtagagaaaatttcggtgtcagactgcgactataaattgctacgtgagagcatcggatcatcttgaagggctcctggttgtataaagagctcaaaggacatgaggagaccgccttgatgcgtcttcatggctctgatcgaccaggaagtgatgatttagatcaggacggctcgattgctgaagagcatgtgtctctatttgtcacatctgaggacttgagtttcacgttcactgaacaaaaacggacacagcttgttgttgttacgttcgatacacgatcaaggcgttctgcttctgcaactgatgatctccgaacggtttggaggtatttgttgacgagcgaattttagatagattgactcgtctcatcggaaggcgacctctttaggcagtttgaaggtgacacaatacatgtccttgttcggggcgacctttctcacgtagtgcaggttgaacccctcgctctgtggcgtgatctcgtatcgcaacgtatcgctcgctcgctgtcaagccgaacatgtttagttggggatcagtatctgaagtatgggtttgtctgtagatcgtgcatggacatcggactcgccttgcagagatcattcgtcgccgcctctccttcggcttccttggaaaagcaatgcacgtgaatatggggcatgtcgatggcatcaacgccagggaagtcgggttgagagagcaggggcttgtagcacccattatacgcgtcgagaaattcgagtgctgatccggggaggttcatgacaaagtgacttatcgtcctcgctgtcggttcggcagccgacgtcgatgctgttacttcctccttgtcgatggtatgcgaagtggccgccgccgccgccgcgccagaagccgaactctcgcccaccttgagcgactcgaactgttccgtgacatcaagcacgaccgacccgtcctctttggcccgcttggcggcttcccgtcgacgtctcgactctttctcttgctgcctcaacgacggcttgggaggcgggagcgggtcgaaaggtctcgtccacacttgcaggggtgccgttttgataaactctcttccatccatcgtgctgaccctcaaggcctcttccacctaaagcgtcgtccgcgggtcacgatcaataccctccactcgactcggctaccgggcatcgacgaagcggccacgcgacgtacccgattatcgaccctgttcttctccatccacctcgtactctccgggttcagatcgttcccgagcaccaagcaccgtttcttggccgcggggacagcgaacggtccgaccccggccatgacgtcggcgatcacctgaccgggctcgaaacgatggaccagacgttcgtgttccgatcccaggcgagagttccaatagactttggagaaatcaaaggtgaacttgcaatctgattcccgctgttcgagtccgaggcgtggcaacaagatagggagcaagaagtaagcagagtgacgtgggtggcaagagggcatgaatgtagatggtgggggacttgccatttcggcgatgaaatcatcgtcaccggccaagacctccatcttgaacaccctgaattctgaatcgatggaatcgagcttgttgaccacggtcctcaatccagggtttttctaagaggggtccgtcaagcgaagcgagccagaacacagagtaggagtagaggagagggtcgatcaatccgccgtcccaatcggagatgcagtcaaggcgaacgaacggcaaactcacatctagcatgacctgtccgatgatgtaccggaaaggcaggtactcgtccctcaaattcatatgcgctgcgtaacatcgagtaccacccgaggcgcccgaccgatccatccatcattcccgaaagccatctcagcgcccgtcctcaaccctcggggtatcactgttctcctccggaccgcctactcaccgatatgtcccgtctgtgtataactcgtcggttgatcctccagtaattcttcggggaggaccgcgtgcaggatctcggcggcgttccagtgttcatagtctaggtgggttgtatactgacgaaagccgtgagagtagggtcgaatgaattcgagtaaggttgaggggagttgagctgggaagagagtaggattgggtgtgagaggtgggaggtcagtaagggagacctagacatggagaggaagagggggggacgtacattcttcaggataacgcaagaggactagtcgggtttccggggaatctgggtcggcttcaaccgaccggagtttgggtacagtcaggaggtgtctacatcgtgcggggattatcagtctcgtgacgtcccccagctgcttccgaacaagtactaggaatcatcatgacgctcacggttggacctccctagctttcgtcactttggtaacgtcctgcctgttaaccctgattcccaaccttgtaaactcggtgacgaacgcgcctctgtcgagttgggtcatgccgcggtgaagcggagctgggatctgttcgatgatcttgcgtgacattgcaggcaggtcggtttgattatttcgtttgagatagcgtgagagggctcggagcatgtcccagctacagatcagctccgagtggattgcaagctaggttgtacgagacctgaatgattgactagatcagtcagctaagagtgtaaaagtcgagtagaagatgaacgaacggatgagtccgaagccgacgataagcggacatggcactctgcgatgagggtgtattcaggatgtccgcggattgacgcaacggacatcaacacattttaatgtccgtcatcctctaattacccgggcggcggtgccgaggcgcgatcgatgcctgagccaggtcatcatcatcccatcaggcccatcaccgaacgaccaacctcgtttgaaagtgaacaacccatcctcccctatcacgatacccaacctcataagctcagtagtgagcacacaaaagtacggtcatcgatcaaagatggacggagctatccccatcgccgaggctcagtgagtcccaaccgcaacaatcgagctcgactcttcgcgctcaacggccagctcatcgactttctactgcacccctcctcgtcaacagaaacaaagtaggcctcgccccattcattgacagtatcgttatcgaacagaagcacttaatacaggaatcctctccttgatccgttcatctacaggcatctccagagctcaaagctgtcatcgcttaccttcggagcaagaatggaccgaaagctagacgaggcgttctcaacggtaaacgagtcgactatttcaaaggtacgtcgagtcggcttatcccaccctttcacacgtcgcattacatcttgtgtcattggaaaacacgaaatcctaatccgaattacctctcggcaccttgacacgacaggcaagacggcgatcaagtgcttgttggcaccggcttatggaaagacgaaaaaggtgcccaaggtgaccaacgaggaggaagcttcggccctcatgcagaggctgttacctcagtgagtccattcgatatgctatccgacacgcgattgcaagcgagacccaccgctgatactcccgccctttccgtcctcctccccctttagcgcctttttcctccaaaccgaccgacctgaacctccagcccctcttcctgcaggtcaaccccgccccctccaaatcgcccctcaacaatccttcaccccccaatcatactatacatggttcctcgccccctcggcactgtccacttacctaggatcgggtatcatggtcctcatcctcctcgcaggtgtcatgttccccctctggccgcccagcttgaggttgggcgtctattacctctccctaggcgttttggggttgataggcgtctttatggggatcgcggtggtcaggttgatactctgggtgttgacgaggttggtcatgaagaggggaatctggtggttccccaacttgttcgaagacgtcggtttcgtgagtaccctccccctcccccgcgccgcggccaaggtcacttgatcaggcaaaccggaagtcggtcgctgatacaccacgcggctcgtcacaggtcgactcgttcatccccttttgggcatgggataacccggcgtcaaaaaaatccaaatccaaatcatcctcatcatcgtcctcttccaaatccaaatccaaatcctcctcgtcctcgtcctcgaaaagcagtataaaggctacccccgtcgctgtacccgtcaccgcgggagtaggactaggggacaccccgtcagccgcacagggaagcggaccgacagctggagagagctcggcgatgcatatgggcggacaggcgaatatgagacagaggcagcaggcctacgtcgaggacgcgggggatgacgagtagaggagaatagagtagagtcgccgcctttgaatgtcacgattatgagctgggaccctcgacttcagagccgacgcagggtaggggcctaagatgaccggcacgtcgcgcaagcgttgagccgggtcgagcgatgatgatcatggcaatcgatgtgagatcgtcgtgagcatatgaatcctatgtgtaagtattacatgcagcgcgctctcgtgtctgcgtggtcgctccggaaaataaagcagggtctcgagatcgaccgatggccatggatacctgcctcgctggaggggaaggtgcgacgagcttgatcccggggtcgccatgaggaaccattctcaaggactggctttgggctgccatggtgcagcgctgcgtctgatccagatcgaggtcgcgaatggttctggcgtctaccacaacgcttcgcattcgggttccgtcatctgcatggcctcgatgatctccggacaggatcatgctttttagtatccggcgctcctcttgatattgaaccgagcgccattgagcctactctgcctgtgtaccacaaggtcttcctcgactcgtcgcacgagtcatgaccacccaagttcgatcaagagttgaagatcctcgtatgctgcatatcgtgccgacacatcaacagctcccctaagggccaggtcaccgccggtccttcttcgacgtcatctgcccagtcccattttcccgatactgatgctatctcctctgcgccgacgtcctcttcgccgccgtcggtgtaagtgggaaggtcgatcccagtgctcgtacacaggttccgctgcgcttcgatttcaatgcacggttgaagggaatggagtaacagttgggtagatgcatagggaccgatgaggttcagacggaccgccgaggataagagggaccggacatgcagaaataggtgcaagtgtaaagaacgttctgtgtattatcagtaattcgcaaacgatcagctgggagaagtggactggacaggttacaggtaggtacacaccaagcgacaagcccatggcccgggtgaggactccccaacagacgggtaggtgcccatgagcttctcctcgtctgatcatacgcttgtacgaatcgaccgagctcttccaccagagaggctgatcatcgccggccggatccgtcgataggtttggcggggcgaaccccttggtcaggagggtcaagagcgcgatgccttgtgccgtcgaagacctcctcgtgacgtgattcaaggtcatggcttcgtacaggtcatccagcttgaccagactagctaccgtaatctctgtcgtttcaccttccagcttgacggtctgaaggcggtcgagtaaggtccatgcgtctttgacaaacgccagcgtgctcttggcatagttcatcaccgagctctgagcgaacgtaacgacagcctcctgaatgcccaatctggtcgttctcccctcgcctgataaggaactaaggtgtgattgggagaagaatccatgcttggcatacgattccaagcctgacgaggcgacgaatcctccggtgggcaggttcgagtccaggaggatgtacaggacgtgtcgttccagtgcgctctgatcgatcggtagggacgacatgggagcggctgggtcgaagtcccgtaatgagacaggatgggcgactttatcgacactaaaattaacgatctgtacctaagactgagttgagtgaaacgatggttgcggtcgaaaagaagggacgaggagatgaataggtcaactttggttgaatgacattctcgcgcaccaagggcaaagtccggctgcaactcgaagagaatgacgattcgtatcgatactgtcctcgttatgaccccaagtgatatacataggtaataccggaccatagctacctgcgagcgtactaggatcactcaatagttgcgaattttgagcgtacataaagcattccgattactaccatgttcggtggatccccattcggtaacaaccgcagaccgaccgtcccggacactcgtcaggcgccttacaacccggcgacaactcatcccgcctcgatccggccgccttcgtctctcccacatgcattctcggcacaaggccgtgttcagaatacggtagccggccagagtgggtgtgacaaggaacgtgcatgggtcgatcagtggcaagccatgagagaacactgtcaccccgcttccctcaatccgacgaaacctaccggggtgaagccgattggggacgctcgagcggttggaatgggatctcagcaaaagtccaagctttgaatctagaaggggagaaggaatggagggcggacggggacgacttgaggtggcgagcttaggggaaggtgcagattacgccccacagcccctacaggaaaaggtgctcaagccgaaacgaaagggctgactcatggtcaacgctcttacacgcaaaaaggaaacttccaagtggatacgggttaacatgtcgagcctcttccatgtggaaagagacagtcgaggtcgcctttacccggtcggacgggacgacagagctcgatctacctatggacaacataccgggcaacgacgagccctgccccgtataatcacaagtggacatactagttcgccccgacaagcattaatatccaacatttctcatgcttgaagagccttttcaggctcttcgatgacctggactttggtctcctttggcagaggtttcctcgggatcgtcgtcttccgcttcgggaccacaatccttccccgttcgatatcgatcgaatccttgatcgccttctcatcgatcgggttgaacgggtgcgggtgatcgtcaggaaggaggtacgaggccaagcaacatacgaccgggccgagcgtggcaaaaacgaccatggccaggtagaacgctgtgggcagtgatcgtcagctcaccatacgccgtacctccttgcctccgttctctgaccttggagcgacatgctgttaccgccggcgtcgaagcgggaatagagaaacagggcagatggggtggaaggttgagctaggagtgggaaatggtttgctgagggcaagtcggaaagggatgagcaggggaggattgtatggagcgggagacctgagaatctatattatgacccctcgggcctgaacaattgttctcacagcgggacggatgcaggtataaagtgtgatcgatgacaagacgtgaaacgcgcggtagtttcagcttcaagggacgtcctttgtctgagcactattcggttgacggacgaaacggcccgggtccccgctcgagcaagacattgcaatgacagcacaaacactgccgcggggtcttaaaaagagacagtttcgtattgcagtgcgcgaagcaatccaactgaccgataaggatgggaaggatacaaacagttcggcagagatgtcaatggtgaggcccagaacagtagctacaccttcgaggtgagctcgacctgaaacgtcttatgcttcagttctaccacttggcgatcaaattcctctggttcttcgcttgggcctttgctgcgcgtcaacctacagacatcatatattttcacggtttacctgggctcgatctggctactctggcattgggacgtgattctgaaaagttgctcgactattgcagagatatgtccacacttctaacttgtaccatatcccagcttaaagagtgtagcctcgtcctgctcctctctagtccgcctgatgtacgtctcgatacggcggtttcgtcatggcacaagtctgcaagccttccaatgctctcgctgacgaggtcgccaacgtgtttgcactgccgtgtggacctctctgccgatttatgtgcgattggactccttctcgtgatggggacccggagacaaaattcttaaagtcattcatggtgagaggtagctcatggaaaacctcgaatcgatacgtaatcggtatcgctcgatgagagccgttatccgaaggtcgaggtcgaaccaggcgaaagagaaggggtatatcgggacacgtcaaggttggatacaatgcgagtaaaatttcatgttttagaaacctggaaaaggggcatgtcgagatcagctttgcacgtcatgtcgatcatgaaccccatctaggagaaagtgcaatagacttacaacattcacaatcaaacggacagagctcagtgcctgtgattgagagtcgaccgaatgagacgcatcagccttcaagctgtcaacagaatgaagagtaacatccgcttaccccccgcttccgggtcgatatccagctcggcctctttaaagatcatgaagccttcctccgtctgtcgtcctgcgagttacggcaacaccatccaatcagcgtccctgtctcgaccgatgcgtatcgatgaagagacagatgaccgagctacgtacttggcccgtccccacggctatccctgaacatctcttcatccgcatccacctcccttcgtcctcgagagggttgcaaggccgctttgactttggtcctcgataccgcgctcgggtcgacgacttccacaacttgcgataccggttcgtcctcgtcctcgtgctcatacccctcctcaaggtcatcatgggatttcgagactttagacgtctttgtcttgctcttcttggacttggggactccagtaacggtatcggctttccgtttaccctgcccctcggtcgtctgcacgactcctttcacgttccccgactcgaccgcttgatcgacatcgccctccaaggcctttctcttcttgttcttcttcttattggacgaagtacttgtagtttctcccgactgcgtcttgagagtcgagactgaagaggaagaagcctgagcggaggatttgagaggtttaccggaaaagatgtcgtcaatgtcgatatcgacattgctggctttagggggtgcggccgcagcggcggattttgaagttttcttagccataatacgattatatactgattctccttcaaagttcgtttgacgggtatgagtcgttacaaaagcattaggaggggtggtctatcatgatctatcaggtcatcattgtactttctgtaatgcatgtcgaaatccctgcctgacattttcgatttcggtcgatgatcaccttgagcctgacatcttcgaagagaactccgccctggcgtttcaccgtctccttcctcaggggtcaagcacttggcgattatatactgcgcaagatgattgaaaagggaagagtactgcagagcttttcactccagcacgactatgatctcgatacatctgttcccgatcccttatacctggaatatagctttgggagattttggtcacgacccagcgcgttcgctcggccggacctgagagcttcgcgcctaagaaacaagcccgacacctatgtactttccatgtcactcgtgagtatgatgaccagcctatgatagctcagtggctcgtcttatggacagatcaacgagaagattgtcgcacgagcgctaaaccggttcattacaggagagccgctccgtgtggagtttcctcttgatggacggaaccggacccccggatcagtcagtacgagtagcgagtgcatgtactacatagctagatattggggcaggacttcgaaagaccgcgctgcatatgtggccgggttttgagaggcttcggtgcgaatgcttatcgactaccgagtctgcatcgccccaactggcgagtccagacagatgacaaggcccattgaagaattttacttcgcttagacgcattcgcttcttaccctgtgctaggtgaagccgaacgtacgtactttgatacatttgaacgagttggcggcgaaacgtttgctcgtgcgcgaatccagcttttgcgacaaaaatacatccgaaaccggaaatcaccgaagaccgaggtgggccgggaaggccagcgcagaggggaattgcttccgatggatttctggcggtggcttttccttccggaagtaaatttcccatttgcgactgttgcgtttctgatcgacgaacgttcgtctcgcacgagcgtaaagttgattatcgacaagagcaagagagcaagagactttggtcgaacgactcgaatacatctcgtcgaaatcttgctggtgtcacacactacttggtcagagtagccatccaagaacctgacagcaatcaagaacaatccctccatctgaaatacagccatggaacgtaaaagatcctccgcacacacgggtggcagctcttcgaagcccttgtcaagggaagcgctgagaaaggcgaaccactcgatgatcgaacgacgtcgacgagagaagatcaatcacgccttttcagagttgagagggatggtacccgggttaggagggggtggagagggtatgaagggagagttcaaactagaggtgcatctcgccgggtccaggtcgtaggctggaattcgagctaaacaagtttcggctcacgtgcacaggtcttggagcgaacagtcgagcatatgaggctcttgatgaatcgtctcgacgttctcgagtctcgacaacctcaaaggtcgactcaacccgtcgccgagcagaaacaagcgaggaaacggaaacgtctggcttccactccgacgacgacgacgtccacctcgaattcaacttcgacattcagctctgatcctaaatcgtaccctcattcgggtccgagctcgattgctgcgtatcgtcatacgagctcgagactgggtcgaagatctcgaccagactctgatagggaagagactagcgaggcggattccgaatcatcggaagaggaaccgctcgtcggtcgccgtcaggtcgagagggccaggcaagaagtgtcaaagcctgaagagtcgacgaggtcagatcgggtaataccgttacctctacctctccccatccgcacgaacatcacgagcatcaatgggcatagcaacgctcgacatcctgccagcgctcaggctcaccagtcaggaggcccagaatctagaactctacctccaccgaaacatcgcgtccatgcacgtgatcccgcgtcatccaccttggccctttctaggatcctcaacccggcttccccgcgccctcgaggaagactcccgcttgccgcgttcaactctcctacaccgagcagaacagattcagaggcaaccgtgctcgaggagggattacccagcccggggagcgatagtgggttgggcttggggatggtcgacggaattgccgtcaggatgggtgagtaggaaaggacctggatctcggtgtatcgaaaggtgataggctgattcgttaaagatacagatacgatccaggatgaccttttgggcctggccacgggtgatcaacctaccccgatttcctccttggctctcggacatcatcattcgctctcctccagattcgcttaccccgggccacttgcctcttcctccgcttcccattcgacgatcgtgcccatcacagcccacgagcgaaacaggaaagatctcttcctctccaatttgacggaaatgtcacccttgtccccgttcatcatcggcacctcatcttcgtcgtccacatcgaggtcgtcccagctcttgcccgaacctagccctctcttgccgccgatgattcacaggcaatccatagcgggtcttttcgagctcgaccccatttccctcgagcggacgtcagcgtccgggtccggctctaggtcggggtcgggggaggagaacgaggatgctagaccccggtcgaatcaggtggacgagcaagaggcggccaatatcttgttggcgctctcttcgcccgagagcatggcaccgacaccttggcactcggccagcaagggagccagtccacccggggctttcaacctcgatgtcccacccgagatggatgtggacatgcccctggagacggagcgttcgccgaagatggacggcaccgagcgggtgggtctatccaggacgacgagcgtgacgagtagcgcgaggggaggaagattggccaagagcgccagggatttcttgaatttgcgagaagacgcctttgggttcgccttgacacaagtgggataagccgagacgagatgggtacgacgacgagatatgattatagattggtgctataccactgacgtacaaaataaaagcaacctgtattcgcccccgtgttggcacatctaaatgacaagttttcgtgctacttggcctcttcggcctcttcttgctctctgatctggcgttcgagtttctccctctcttgctgccgcatccggaacaagattccgctctcgaaatcgtcggccgcacggcgttctcggtcctgttcctgctgtttccttttggattcgggcgtagggaacgacgagggtattgcaggaaaagacgacgtccgagccgaagcggtagggaatgacgaggcgaacgtgctcgacactttgggcaaagcagctgtcggtcgaacgggatcgaccttctggcttttcgcccccaagctgtccacccagagtggcgattcgccatcctttttgccggcgaattttactttcgtcccgggtaccaaaggtcgagcgttctcatccccgacctcgagatgatccttccagcaagcccaacacccatcgacattgacccgcttgaattcgacagcgtatcggggtcctttggcctttttgctctttttcggtttgagctcggaggggccggcttggggcaagaggtcgatgttttccaacggcccgtacctcgacgacaaagctgcccgtagagattcagtcgagctggccagtccggccgggtcggttaccgggaactgcatcatcaaagtcaactcgagcgagttttccggcaagaccatcggtttgtcgtgagcatctacgtgcgtcgtgccattgacctgcccgtcgatcgcatgcaaccgtctcttctcctcctcgacggcttgtattcgcgcgacttcggccaccctcgccgcttcttctcgcatcttgcgtccaatctcctgcaccgaagcttcagccgaggcgtcggcatgagctcgagcgagatcgagtttggcacgtttggcctcttcttcacgggcttgtagtgcctggaggaaatcatcgttcgttggtcagcgttggaatagagagaaggtgatcgtgatagggacggacttcgaccatcgtccgtcgttttttctccatccccgccgtcttttccttcttccgcttgtcctcctctaatcgaccgttgagaaacgacctcttggatggatctgtcagcaggttgaccgccaacgagatcgagaagaattgtttggctgtcatcgtcgaaaatgaggataagggggggtcagctttcgatacgcttcgtacggcgaacgacgccaacttgcccgctttctcatcatccgggaactgcccaagacgagcaatccgcacgatcatcagcctcgaacgaacaaccattgacgctcgtcctcggtcgacgtgactcaccctatccggatgacaccgcaaactgagactacggtaagccgacctgatctgtttctcggtcgagtcgacgggtacgcctagcacctcgtacggatcgcccagggcgacctcttcttctgatagcagaggagccatgatgaacggccttcaaactccgaacagaggatatgaggatggttgcacgacgttcggtgtgcatgtttgtcaatttgtctatcgtttacatttgattacgaggcgatcgacctaaagtgacgaacgagtctcgcgtaccaaacgataagacatcacgtgatcgaaacaaacaggtactacctttagtcatatcagcagtgtgtcaaccatgaaactcgacacctcggaccgctccagggcgatagcgataacgactgccccgaatgtatgttgacaagtagcaagtagacgatatcgcttcgcctgaactcaaacgtaaaaaccgtaccgccagacccgatcactcgattggagcgagtcccgctacggcgcgcagtaggctcatgtacgcccagatccatcgagacagcgtgaggatcgacgtagatgtgtacgtgtgagtgagtgtgtggaaagaagatgaaagcataacgcgccagaaggaaacccgtatgagcgggacaggactatttacaaatccgtaggaccaggacgtgggggggtacgacccggatgtcgacggatggacgacaccgatcgaactcgacctcgcctcgcccgcccgtatctcgttcagactcttctcgccagcatcatcatcctcttcatcccctcgcccgtggtttctgcctggatcgtctgatcctagacgctcgtcaaggaaagaaggactacgatgtggtagtctacttcttcttggcgggctcaccggcctttctcttggcggttcctcggacctgtggcgatcgagggggagagtgatcgggtcagcgatcagcaagaagaagaaacacgaggacgatgcccgcgaatcgaagggggggactgaccttcttctgcctgttcttcctctccttcctgttcttcctgttggtcttgtcgaccttgggagcgagaccggactatcattgccaacaaaaccgacgaggacgatcagcgaccttataactcgtcttctgcacatggccagatcggacgaccggacccgacccgacgagggaatcctacgtaccctcacgagcctgtgcttgggctcaaacttcttctgagactcctcgtcatcgtagatcagaccgaacccggtggaccttccaccaccaaacttggtcttgaacccgaaagtcgagactcggcccttgtcagtcttgtagagggcggcgagcttttcgttgagctcggccttggagacggtggctcgggtggggtggaggacgtcgacgacgaattgacgacggttgaggagacggttggtgatgaacttgcgggttcgcacggtgatagggccggagggatcctgtggcgaggacagagagaggaggggtcagtcgtcaggtcaggtcggatcagaggacgggtttgtgcgggtcgggtcgggcgagacgtggcagggacaaatgcagggcagcgtgggcgaatagcgggaaggcgaggtcggccaatggatgagccggatcgagtgtgtatgatcgagaccgagaccggagtcgcatgcccttccgaccagtcgacatcgcaacctggtcgtgccaagagcgtcatgtcgacagcctcatccaatcggtaggtcatgccgtcgattctttctgctccacgcctggtacgtctgctaccagggtgtcgccgcccgttctctagaatgtcctcttgatcacacgtatttccttgactgaaagctatttctaaatgccgttcgtgccgtgatcctgaccgtttacgagtcgagctttatcgatgtatcgccgtcaaacgttcctccttgtgcgattgaaagttcccaggtcgatccttgaccaataccgttccatcgtcctgccgtccgtctgccatttgccctcgccgacgtttgacgttgccattgtcctgccatccatctcgcctgtgacgccgtgaccacgcacaatccgtatagagactcaccatcttgaagggttgctctcttctctcttgatgggtagtcgggaggagggggggaggaagaagaagcaacgggggggtccaaaatcaacgggggtacgtccccctcccccccccttctccctctcccagctcctgtggaggggtgtcaccatggcaactagtaatggggaatgatcagtggccgagcccgtgcgttgactaccgatcgtcttgttcgagaccggcgtctatcacgtgcactactgcttcggtcaccccgacaccctcgactgcctcgattgacgttgacgtcaagttcttggagacacatgcccagggtttgggcaaggtggtgacggaactccccagccaggtcgagactgcaacaaagaggctgcaagagaagcgggctgaacgcgccgcgtgcgcgggtacggccaaatagacagacaaatgaccggtccattgacgtttgcttgtatacgttcgagataccaggttgttcgatatatatctgtccatctacgtgcctcggtctatcatcaacatattcgtatcgagccatttcgccaccggttggtagcgagcgcgatggtagagaaatatcagcccaagcacgatcagccgttcagccttgcggatgcagtggacttggacgtagagattcttagcaacggtgaggcaacctaaaaccattggtaacaagcgagatacaggtagtagctgatcgtcttcggcagagatcactcggttgagaaactctcttgaacatttgcgggcgtccaaccgcgaactcgatgccttcatcggggatcccgagaatgcgaatgacatcgagggactgggggaagtgatcaaggagaacgagcaagtcatgtcagtcaatatacgtgcactgtggcatgtttcacagctcggttaattgatcaaatcagtcatctcgtagagaagtgcaagaagatcgaatagacttgttgaagcacgctctcgagcagaagatcgggtctgaccccgccaacaagcactacgattcagcagcaccaaccaccccgcccgagactacgaatgagtctgggctaacgcaaaccacgaacaacgaatcgcccagagcaggcgaggccgatcttgatgcagacgatgaagggctgtacctatgacaagcctaatggggatgcactctccggaacgcaaccttgtgtgtacggggaaagatcggtgcttaggttctcacgaagaaaaggggaagccggcagtcgtccctcgtcaataagtgatggccggacctagtccctacttctaagggatcgtcgatgctctcaatttcagttgagccgcgagcaggttgcgaaggtgagatgagcattggctcgacaggatccgtcttgatttcccgctcgtataactcggcgacaagctgatcggcctgactcgaagcttgatcaaggcgctcgatttgcactcagcagtggatgttgagcttcagacatggtcgttagcggggcttgcaacgaggcataccgaatgatgccgatcgagtccaggatgttgggtagatcgccgctcaagttggaatcgaatcaaagccggaattgcggccttaaactgttgactcgacttctttccgcttaccaagcgtgaaacaagaaatcatggtcaccccgttttgtcggactgacccggtcagctgttggtgtgagaggtacaagacgtgccttcacaaccatatacgagatcatatacaaccatactccgaagatgcaatcagccaagtctgctaacccgaaacggtgtcttcatcgagcaacctctgcttgaggagtattctgtagcgctcatttttgtcaacacgaatgctctgggctccgcatggggaccattgcttactgattgtgcaggaaccggtgcctcgtccacaaagtctggcagagcggtgctgtcgcggaggtaacttggaatctcctcttcctcgccgaaatcttcgcccaatgcctcgagttctgatcgacagtacccgccagtcagaggtgatcagggtttccaatcaagcaacacgtttaggcctcacctgcttcgagatcggcttcgtcgacttcgtcgggaactccatacgtgcgacctagagtctcctgaatctcgttggcctgatcgatcaggtcctccatgtcgtagtgaatattctatggatttggtaggcataatcaactgtttggtctccacgtgctgagacgagagacttacctcgatcttatcaatgtcgatgttcttgtactgtttcttcatctccttgttcgcgatctccattgcactgaccgtggccatctacaatttcgaggcggtttaatcattacgcttcacgtcctgctattatacgagaatgcttgcagtactcacggtattcttcaaattctcggtggtcatctgtgcctgctccatgttgaaagtctgctgagtgagctgggcgagctgtccttcgtacattttcttctgctgcaagaccctcattgcccgctgggtaacagccgactggaaggacgaggacagagtcagcgaagttcatgtcaggcctggcaagtgactctgaccttccccgggcctgccttcatctttgacatctgcgtcttgaagaccgaaagttcgccatcgagctttctgatcttgacttcgatgttgcctatcctcgtatcggtctgcgcacagactaagtcagcacgatcgatcgatgagctagcaagacacaataataggctaacggaattgatggcatccgataggttgggctttggtttagacttgttgctaccaaatatctgtaatgggaacatgaaaggcgatgactcattcgctgtgccgacgtgtaaagcaggccgtctttgcatggaactaaccctattcatctcgatcggcgatttgctttatgatcttacgagggtgaaaaccctctactgctacgatactatttgaacccagactcttcaacaggctgccgaggaagatcaaggtgaaggctcgaaactcaaccgttgaccgacctcgtcgtagccctctacttagcccggaagtacaataacttccgaatgacgattggtatacggacattccgaaacactgtgatgtccgttcagttccacatatctcactcgcaacgtccatccacaactactgaaagatgaatacagccttagggatgccatggtcatcaatatgacggtgcaatacacatcacgatcgtcaaaatctaccttgctctagcatagttactagatagccggactcgataccaagatcgcttccacacgatttctcctacgaaccaagcaaaagcgaacgagatataatggcaggacccagcatcaaccctggtggatcggagagtaactttacggacaaggtgagacatagcggaccgtctgtcagatttggtctgctgataagtattgcgaattgtccgtagggcaagcctatggaggtccgattgtccaatatgaacgctgccaagggtgagctgggcagtacgtctttccatacaatgcaaatctcacgctttgtatgtccacagccgtcgccgatgccgtgcgaacgtctttgggacccaaaggaatggacaagatggtgagcaatgcatttacacgtgcagcaagtgattggtactgaatgcctctataccagatccaaaccggaaatggcgaagtcgtaatcacaaacgatggagctaccattctgaaacatatggctgtgttacatcctgccgctcgaatggtacgagactgaccgaaacagccagttgactgcatgtttcaatgtcgatttactcttcaacatcttctacagctggttgaactctccgctgctcaagatatcgaagccggagatggtaccacctcggtcgttgtccttgctggtagtctgcttgctgccgccgaaaaggtcctgtcgcaaggtatgcggatcgatgtgtcttgcgagtgttattggcagcgctgataactgtgtaatccgggtcacaggtatccaccccaccatcatcgctcaatctttccagaaggccgccgccaaggctgtcgaatacttgacggaaatgtcgacgcccgtcaaccttgacgacaaggagaaccttctgcgagcagcaagcacgagtctgaattccaaaatcgtctcgcagtactcttccgttcttgctcccattgccgtgcaggctgtttctcgcctggtcactcctgaagcctccaatgtcgacctgcgtgatatcagaatcgtcaaaaaggtcggaggtaccatcgacgacaccgaattgatcgacggattggctttgaatcagacagtcgttaacagcgctggtggacccaaccggatcgagaaggccaagatcgggttgatccaattccagttgagctctcccaagcccgacgttagtctgcttgtaaagcgtcttcgtgatcaagcttcgagctgacgttgctgctcgttctcgcacgtcgcagatggacaaccagatcgtcgtcaacgactaccgacagatggacaagattttgaaggaggagcgtcagtatctcttaactctctgcaaaaagatcaagaagaccggctgcaatgtcctcttgattcaaaaatccatccttcgagatgccgtgaacgagctctccctgcatttccttgccaagctcaagatcatggtcatcaaagacgtcgagagggacgagatcgagttcatctccaagtcgaccggctgcaagcctattgctgacatcgacggattcaccgaggacaagcttggatatgccgacttggtcgaggaggcgcaaaccaagaacgacggtgccaaggtcgtcaaggtaactggagtgaaaaaccccggcaaaactattagcattatctgcaccggcgccaacggactcgtgctggaggagagcgagagaagtttgcacgacgccttgtgtgttgtgaggtgtttggtaaagaagaggtgagtcgagctgacgacatatggcagtcaggtagcttgctgattctttgaatcatctctaaatgtagagcattgatcgcgggaggaggtgcacccgagattcacgtctcgcgattgctcactcaatatggccagactttgcgaggcaaggaagcgtactgcttccaggcctttgctgaggcgctcgaagtcatccctaccacgctcgccgagaacgccggattgaacccgatcgccattgtcaccgagttgcgaaacaggcacgctctgggcgagaagaacgccggaattaacgtcaggaaggtaagaatcggctccatccgataatccaggcagcaaatcgcggcactactaaagcaagtctgcgtgtgacagggtctcatttccaacattctcgaggagaacgtcttgcagccgttgttggtctcgacaagcgcaattgagttggccaccgagacagtcgctctcattctgcgtatcgacgacattcaggtgagtcgaaactcgatgtcgccgagtctccctcgaccaagattctgatcgccttactatcctcggcagttcacgagatagattgcagcaatgcagatccggacttcatgaaaccatgacgatgtaaatttccccgagattgacgatcttgtcctgacgtcgtccgatgagatcggagtgaaagagttggttttggagactgcatgtgttatattccgttctatgaaaggacctcgaatcgccgtttgttgccgagggtgtttggtcgtggtcgtgcaagcgatgccgtaactttcgaggaaacgcatccgatgtgtgatgatcattcccgtcacagcgggcacgagcagcaccgtcatgatgggtgcaacaaccagcttcagttgccaattggctcgggtcgttcatctcacaccacccccgccctcttcatatatgtatgattggtccagtgatcaaggttactacgactcttcactcgtcaaaggcaaccacatccttgaagtcaatcaaaagctccaacatcgagctcgacctttcgttacggccccgtcacgaattcagatcagtctctgtgtcacgtagttacggttctgcacagcttcagagggaacacgaaattcaccacgattcgactcggctcgaaataatcaggaccaaccgtaccgggttccagggtatagtcttcaggttcattaccagggctttcagcagctcgattgagttacctgtgagtaacgacttgaactccgctctcggtggggggtggggaactggttgctgtcaattcaccttgacgtccatcaaactgtaagctgatcatgagttttttatttattttccagacgattatcagtatttccggctgcctccgtctccatctacgcctgaacgctgctctagagacatcatgcgagctcgtcaatccgtcgacttgaccgcacaaaacgatcctgccatgtcacatcggcgcagcgtgagccacgtcaatccgggtcacggccgtcgaccatctcaatctcttggaggagctgccacgctcgagctcatccaggctcaagctgcgaaccaagctcaaggtggagattccaacccagtcgccttggtcaatcagatcgcagccgccaatcatcccggtaacaacgtcggcatcatgtccaacggacctcttgatccatcgaaagttggtccgcccggtcctggagttatggtaggaccaggaggatacatgagcaacggtcgtaccaacgatatcaaccagatcatgcaaggtttcaacggcatgcaattgaacggcaactcgctcccccagcagcaaatggccatgaatggcaacaacaacttcggaggaggatacggcatgaatggtatgagtgggatgaatgggggtgggccagtgaggcgagggaggatgagcacggctcctggaccgactactggggtatacccgtacagtcatattggaatgaacggcaaagtcccaggtgccaatggcatggtgagtgactcgactcgagcacacgagtcgcttcctgaagctgaattctgcacaattacgcatctttccagcctggaagacttcctggtacattggcgaacggccagatggatcctgctcaggtaaagttcgctagcgcccacggtccgacccagcattctgattttcgctttccccggcagatgaccggcaattacggccctgctgctgctgcagcagctgctgccgccgcgggtaacacgaccgggaggactgtctacgtcggaaatcttcctccaggtgagttgttctgccaagctctggctcatcttttcgacgcatagctgacaacgacgtccacgatagatgcctcggtcgacgagctaatgaatctggtccgcttcgggcctgtggagtccgttcgactattgccggagaagtcttgcgttttcatctcattccttgatggtgctaccgccgctgcattccacgctgatgcgaccgtcaagaaactcacccttcacggccaagagctcaagatcggttgggggaaaccgtcgaccgtaccttcccaggtcgtccaagcgattgctatggccaaggctaccaggaacgtctaccttggtggactcgacgactcgttgacagagagcgaattgagggacgacctttgccgctttggaccgatcgaccaggtcaagatcgtccgcgacaagggaatcggcttcgtgcatttccttagcatcggagccgccatgaaggtgagttttgggtgagccccgacctggcctctgaggtgataacattgcgttgttctcgttgcaggttgtatcatcgctgcctaatgaacaagcttggcaaggaaaaagagttggctatggcaaggtaatttgcgttgtatcaatgtgtcccatctttgcgattgacattgatttgtcctttcttggcatacaggaccgatgcgcatacgtgcctcgggctcaacaggccgcagtccagcttgctcagcagcaagcggctgcggcgctcggtcatacgctcggcatgcctggcgcgccgttccaggcgtttaacccgctctccccggctacgctttacagcagcacgtttcatagccccgtgcctcgacaaggaggattcgaaaaccaggacccttacaatcaaaccatgtccaatcgatgtatctacatcggtagtatacctcccgaggccgaagcttcggatgtattcgatgctatccgcggcggacttgtcgctcagcttcgttacttgaaggaaaagcattacgccgtgagtccgacgcagcttgattgagcaatccgaacaacatcgctgatcgtgtcttcgttagttcgtgactttcgcggaccccaacgcggctgccagctttttccagcaagcgactggtcacggcttgctgattcacaacactaaggtcaagatcagttggggtcggtccgtcagcaatctcagcccggccgtgatggccaacatcacttccggtgctacccggaacgtgtatatcgggtcggtcgacgattttgaaaaattcaatgaggataagctgaggcaggactttggcgaatacggaggcaagtcctatcaaaatacaatatagtttggccttcaagctgatcaccttgtcttgctgtcatacagagattgagcaaatcaattttcttcctccgaagaaggccgcgtttgtcaacttgtcagtccgacttccgcaggttttgctattcagttttactgatactgattgacaatatagctgcgccgtcggaaacgccacgaaggcgatcgagcgcatcagggcgaaccctgagtatagcaacttcaagatctcttacggcaaagacagatgcgccaatcagcccaagcctcagtacgtctcccacagctcgtcgcgtactctgctcttctctgctcacgctacgatcttctcgccagtcactttggcttaactcctcgatctggccggaccgatggtgcttcttccggtcaaggtgtacagcctgaagactcgcccgttgaaagtagcccggagccatcggctgttcaagaagagtctgttgaggaggtttccaagccaattgagggcatctcttgagctcgactgaatccgctcctcgagaacgcaccaccacccgtttttttccctcaaaaagcagaacccatgagcgaaatgtcatcggagacactgttcaggaattacgatcggggaccttccacttggttctcccgccatctagttgacgatgctatgtactacgctccctatcgagcatgacgaccgttccgacttttacatgtctatacctctgaaaagatcacgtgacgtgttgcgtcgcgttgcgtcgcgttgcgttgcgttgcgttgcgtagcgttgctcttgcctgggtcacccacctttcaacatcaaccgaaagcgagcgtttggcaagctcgctcagattagagctgattgagcctctgtgtagtcgcaactcgttgatagtaggcggaaccatcgtaccggtcaatgatctctcacctcgaggtcacgacttccgctcgcaatcatccgcagtacatggccaatatgccgaacaccgtggctgatgttgatgctgcactcactcggctcaaaggactcaatctggatgacgatctgaacgatggcaacgctgaacatccgatagagatcgacgacttcgacgagatcagcagatcgatccgtaaaacaccgaagaagacgagaccgttctcgtttcaaatactgccgcgggatgagaaacctcgtcgagtcccagagcccatctctgcacaatcgcccatcagatcacccgctcctgtcgctttcgactcccccatcacagtcgcttcgtcgatcagaacagtctcgtcgatcaattcgccgcgtaataggaaggtcgcaccaaaaaggcgggtagtctgctcctccgacgaggacgatcatgacgacgaaggcaacaacgagacgcagcgaaaaatactgccatcagacttatcgggcgaagaggaccagaacaatgaaccggctaaaaggatcgccaggaaaacagctgtagccaaaggacgtgatctctttatagagatcgaatcgagagacttcggcgacaaccatagtgaaggcaatgagggcggttacgatactcccgggagcctacgagacttcatcgttgacgacagcgtcattgaatacgaaacggatgcatcacggcgcgacatgagcttgtgggaccctgtacagctctcgtcagacgaggaacagccatggcagaggaaaggtggtcagcgtgaaccgatcgttctatcttccgatgccgggtccgatgaaagcgacggcgagcaatgcatccccggtccatcgacaccgccgaaaaagggaaaggccggcccatctggcaaatctaaacgagaatggaatgtcctgaagcatcaactcgctgcaaacctagtcagggaattgaacgagcacgtgtttctcggccgcttaccagacataccgatcaaatggtcttcgagacttttgagcacggccgggagggcacaccgacaacggctgaacccaggagaaacgctaccgcaagttaggattgagcttgccgaaaagattttggatgacgagggcaagtgcgagttcaagaacagaccttcaatcctccactaatctcgcaaaacttttctctgacagaccgactaaatcgaacgctggcacacgagctctgtcatgtcgctacgtggcttatttctggagatctcaagaaccctcacggcgccaattttaaaggctggggcaacaaggtcactcgctatcgccccgacatagtggtttccgtgcgtgattcgattctcaacctacagcgtttcacgagagtgactaatccctacaagctctgttagacgaagcacaattacgaaatctcgtataaggtccgcatggttcgatcgtgattatcgattcacggcggcactaaccctcctctcgcttccaacagtaccaatggcgttgcgagaaaacgacttgtggcaaaatcttcggccgtcactcgaaatgtgagcgcgcctgcagcttgtagcgttctccggctcaatctctcactttccacctccgtcagctctggatgttaaaaagaaatgttgtggggcgtgtcgatcgaggctcgtcccgatatttgccgaaggaacccgacaattgtcagcgttccagatcttcatgaaaaacaatatcaagattgtcggtgatgagatgccaggtcagagtcgcggggaggtaatgaaggaacttgggcgtcggtggatggtcgataaatcgagatgatatcgtgcataaaatgatgacaactgtaaaattattgtacattcgtgatcagggacgtcgatcggattcttctcgcatgaggccagctcgctcgctgttcatggcagacaactcttggttcagttcagagacctcttgaacaagatctcggatccgagccaagcgttcggagatgaggccgtcgagctctgctactcggtcgctgggagcagcgccgagctcttctactcggcggcggggggcggcggcgatcggaagcgaggtcgcactgggcaagctggcagcggtcgaggtcgccgtggtcgtgactgctggggtgactttgaccgggagcgacagcgagacggccttggtggtggtcgtggcagcctccaagctcgaagcggaaggcgtgaagccgacggtcttggcacgagccgtgcttcggttcgacgcagtggcgggcaccggtctcgaggacgaagcgagcgaaagagaagccgacggggcggtcgaggtcggggcggtcggggcgatcggtggcgtcgcggtggtcgaggtggtcgtgaccgtggtgatcgtaggcgtcggtgccagaatcggagccgacggggcggaggccgacaaggacgagatcgagcgggcggcgatggacgcggcaacggacctgaggctcgacgatgcggtgatcggcatcgacgtggacaagaactccctgtacgttgcaatcggctcggcgaacacgaccgaacgcgaggtcgagctgaccgaggaacgccggtcgtcgctgtcatccttccatagacgtgggcccgccttcttcgcgccggcgaagagggacgaggaatcaacctttttcgctgccgggtgaggaagcgcccaggactccgcgctcaattcccgcttcctcatctcgctgctgagctctctctccttgatctcgccaacggtcatggacgcgaaccgaccgaggtgtcgggaaagggtagagagagtcgaacagggttcggacgcgaaggcagacgttcccgaggcctcgatctcggcgatcaggtaccgctcgacgtatgcgacggcttgagatctcgcttgatcaccaagctcgggttctcgagagatcactcttgacccggggagcgaggctctaagccaactggcgtaattggcggccgccgtccgagcaccctctagatcggttcgagtatccctgcacctgaagacgtgcttcaggtaggtcgtcgatctcgatgtaaacaccttatacggcattggatgtcggtcggtaaggcggtcgagccggtcccggtccccgtccccgtcaacgtcgacttcggtaacaacgccgtaccacctctgtggccattgcgtcgtcctcttcttgtacaacgaaaatttttgactcttaaacaagagattcttgtctcgtcgcgatccgtcaatgatgacgaacggggtaaaaatcggcgcaagcgtctctcgcctccattcgatggcaagcaccttcatgttgaggtgcttagagacgtctctcgcaacagccttggcgatttgcaggtgagcccccgttccgaaggtgaaggagccgaaacgcttctcgatgtcgtacttcgtgacagcgattggctcgctgcggctgtccgcgtcgctgaacagagaatccaaagcaggaaccgagttcatggtgttgagagttgcggtgagaatatgtgtaggagactcgatcatgaagagggatagtacatcttgatattcttttcgtccttgcttgctggctggttgcttctcgcaagtccccccccccccttccctcactctaccattccgccaacaccctctgctctcgtcttcttttcgtcggaaaccgctttctcacgcttccaatctctactctcgaccggaaaacggtgcgcttcgccttctcacgcgttttcgctgatgaacgatgacgtcgggattgtcgatgacgtcggggttgtcgtcgttgtgcgtgcgctggcaagcctgcttcgtgtctccagcttgcccgcccgcccgcttgttttcacgtgacgcgtcgattccgcagtcgagctcgccagcccagaatcgtatatattccgacccccgctcgtccttttgcccctttcaaacaaactcacctctcttctctttccttctctcttgttcaaccagcactcgctacgacgaccaacaactgccaccaaggatcttcggttcgttcaagcttctcctttgtcttgacctgcgttgccccgccttgttctcttcgttcatctcggctgatgctgatccgatccgcttctcgcgtcggttcacagccaacagaccctcgtcgacaatcgcgtttccaccaacaacttcgctcatctgacgcatgtcttgagccccggtacccggtcagccaggaattaagccaggagggattcatcttcacgtggcttccatgaatattggcaatacctacgtcgaagcagctacggcgaacccccggcgaagagtcccataatccgaacgagaggcgggacaccttcgtcgtagcaagcacgtcatgatctctcggtacttccgatagcatggaagtaccatgagcgacaaacaggcgaggcatgccctccatgaagcaagcctgttttactcgacgagtccgtcccccccgccggcgggctctgagaacggtgcccggcgtcctggctgcggagcaggtccgaggggagttggtcgcctttgggctttcttctttggtatatcctggatcggttaccgtcacgcagcgggcaatgggtggacgtatggcgacggagaatatacggggaagacccctcgactaagaccaaacccagatcgagtgtccctgttcttcatatcctcgttgctgatcttgatctcgctctccgcatgtcatcgcaagcaccttcgcaagaggtcgcccatcgtacatcagccgagttcgagtcggatcgtaacattgacggtgtcctcgtcgacacctggtgagttcatgtccccggtctctcgcttggtagccctcgtcgaccttgttgctgaccatcgtccgcgatactcctctagccgctcctgccaccagggcaggatgcaccagcccgcgcgtgtccgtcacatcgagttcaaccgcgactcgtgagttcatattcctttccaccctcgcatatcgatatacgctgattcagctcgaaccgacgcgcaaccatccgtacagcgcgccgtccgcctttcgactgtcgaggcgtccctttggggttccaacacccgcttcccgatagcatagcatcggtaagtctccgtacacatccctcttctcgcgtcaacttgctgacgcgtctctgacattcttgttgcggttcaggcacatccggttcgatccattctccatcgaccgggcccgggagggataggggaggcatacgtcaatggtttcccgggcttcacgcgtttttcctgataacgtccaatcttgtactcgaccatgaatgatacgatcccatcgtcgaccacccatattttgtaaagtgattccaagcacacgtccatgacccctatccgctttgaaaagacccgaccatatcctcttgctgtagtgatcccatgcccaaaaccaaggccaggaaaaatcttgaaggcgaggcgaggcgtgattggcccgacgcgtcctcatccgcgttgacctttatcactgattaccatcaacgatacgataatcccgcgaaactccgattccattttttttgtccaaaatctgaaatctccctttgtgatcaatcttgaagtcaccttgaaggaggatgtgtcgcctttgaaccagcgatcaaaccatccccctcgtctcccccagcgacagacgagagacaggcaagcgaggtcaaaggatcctcgtccctgccgatcctctctcctccctccccgccattgtctcgttgaagaggcggcgtctcatcgcatcaaactataaatgcgatcgagtgtctcatcaaaagttgaagcgatcgactgagatgccaataaggataaaggtcaaggactacgatgataatgaaggatgcggggacgagtgggataggtcgttagaaggggtgattggaggtggcaagccgagtgcgggaggaagggtagggttgactggaccgcgctcagctccgtgtaaagcgcaagggaaagcgcttttacaaaagtcgacgaggggtgacgtggtcccaacgcgattatgcaccgcggacaagaaattcggcaaaacttccactgtggtatcgatcaggatgtacaagagatcgacctttaacaccttaccggttgagatctggcttcaatagtcgttgttgaggtgtttttgcgtttttgcgtttttttcgtgtcgatggcgcgtaaggaaatggatgatacggattggttggcacaccgggttgacgcgctagactttcacgcaccgcctggtgtcagcgctttgttggcctttggccttgtccgctggagtcaaaatggaatgcgaatcaacgttgggccgttgtgaaactatcctacagcgacgatctatcgaagcttatgatggatgtggacatgatcggttgatattggggtcttttcttgctcctaacaaacagatatagccacaccatctcgctagcagatgcgagtcagccagcggacgataacgcagcaatgtccatcaagcaaggatcatatttggggcgcgctctatgcatgaacataattttaacgcaagtgagacatcaggtgtcgaggaaaattgcgctgagcccctcgacctttgcaaggcgaagacaatgcctgacggcgtccgctgtacttgcgtataaacacgtctaccaagaccgggctcgtattgtcgacttggggtatcaaatttcagtccacggcttcgacatggcagcgagtcatagtttgagaatgtgcagtagcttcctcggcgccggaagtgtcctgtcctcacccgtgaggcgataaaatcttgcagagacttcccatttcagggtctggctccgtgcgagacgtgaagctcgggagagactggcgccaaaaatctacggcgccagcccctactagaggcatctgctattcggggtcagagggaatttctctcaaacctggtctgttatgacccagtggttttctcacatgtactgccgtggtgtatcatcaccgccgggacggtaagtcgcagcaatttgctgactttaaagatgcacgaagatcggaaagaacgcgctcgttcgacgacgacgacccaggccacgtggctaatccaagcagcaagtgcaagtgatcgacgctaatcgaacgagcactgccaacttgccatgccgtctttattgtttgctgatgagccgccagaagtcacctcaaagatagtctcaaataaagagtggcctctttcgcacggtgtttcggataaactcctgagtacatccatttccgtgcgattcggaccagcgtcgtttcgatcataaaagctttcatgaatgcctccggagcgttgagcgctttattcgagatcagtcgattttcttcgaattcatcgagagatactttcccaagttctcggatcggacatgtagtatggcgccatttgaacaagaaagaatcggtccaagcgtcatcccgctctgtggaccacacgctgacaggttgggttcaccatctacgtgctgtctctttgggcacggctttctgtgggacgtctcagtaaaacaggaagagtcggaagtgacatcaggcagatcctgcaccaacgcgcacggcattcggtagcgcggatgggtcataaaggtgagaaagaggtattttacgcatgtctgcgcgtcgggttgttacgactcgccgaccagtaacccggtacgacattcctggaactggctcatatcgaaagacacacgaatcacaaacttatggcttgcaaatgctatcagaagctcgcctcttcgaaggtcatgcagtacaagtcgccacccccgaccgttacatgagacgcattgcaatccgccgcaacaagattttgaatctgatcccgtggcttttggacgaggtgggtggtccaacaataagattgcgttcggacgtgcggaaaaaaacggaaaggttctgtcgtgcccgatgaggatacgtttgatctgtccatgaacactcttgatggaagtccccgctgcatacaaaggggaccttgactgtcgattcttggatgggggtctgtaactcttgtcggtctggcctgcggcctgcggccaattgaaaacacgatcgtgaccccatttcgccgcgtccacacggaatcttggcttccgttcttgcccccgcactttccgaggacgaccgtacgatcattttcgcgtcgatgcctgttagcgcgtttggcgcccggttacacaccaccatgtaccgtcctttcttggcgccaacggtccgacagtaccgcagactgcaggggatcggggggaagaaggagaggtttgaattgttgtgaattgggtttcgtgccaatcccccgacagacccccgagccgtcgcgagacgtgggggttgtcactggtattggcaccgtggcttctacggccaacaccgatggggagggggacgcgttcggttgttcgttgtggagcctgtctcttatacacctctcctcccccccatggcttcttggttctcacccgtctcgcgcttcaatcccggttcctcgtctgcaatttttttcgcatcatgtgggctgttacgaaatgttgtttgggtagcatagcatgcataggccctcccttcgatatacgatgatgacaccatgtgcacaggctcggactgtttggtcgagttcgtcctgatgcggcatcctgagagggggaagagagcgttgattagtgggctttgcgggatgagccgcgcgggatgtgtcagaatgtgtcatgatcatcaagatatggtcggcagggagcgggagcagtagagtaccagagtacaggtaggaaaatagatgaacgacgtggaagcgaaaatggaaagggacacacgaaaacggcatagtcctcttactgatcgtcgctggacgattcggtgacgtcaaaataggtgatataggcgacgtgctgggcgatgagctcgctcgtcaacttgagcggttcgtcgctataaagtttctgcacgtcgcgcgccaagaccgacccgtcttcggcgaacccgacggtgtagacggtctcaccggcgaaaccttcaccttggacgtcagcgttggtagctagaagacagggagtgctctgatccttagtgttcttgaggatctgatccacccacgcagcggtgtcggtctggtcagcgaccttgtcagtcgtggcgagcgcattgtcattgccggcgcgcttccagaggtcttccgcgatctggcgcaactgcggattggggaaagtgttgtgggtgtacaggagcaccccacgttgtggtccttgtacaaggttagggtataatgctgtatgatcgacatcgatgctcctggtcatctggtcctgcacgatcaacggccaaatgctgccttcagcattgtcgtagaaaccctgaagttgggaggcttggaagagagggctcatggtggcgtcgaagatgagtccgttgtggacaaactcttcttggccggcgctatcactatcggttttgccgcagtcggaatcgctggaaacccattcggcgttggtcgcgtttggtttaccttcctcgccgtcttgaacgtgaatcagccattcaatgtgggctgggtccagctcgaccatactgtgtccatgtccggaaaacattgtgttatttcttggtcttagtcaagagtttcacggatcactcacgctcgtagtacagcaagtgtagtcaaatcgttgggcttgccgtcatctgaagcgtaagggattcagctgacgtcctcatcgcagaaaatagcccctcgtcaagctcacgttcggttgctaccttgagatcattgggaccaggcacgccctttttgttgtacaaaaagtacctcttaccattccggtccatgcattccttgaaattgttatcctgccgcttctgaggcagtaaaggggaagccgataccactggacacgaactcccaatcaggtcttgtcttgggatttgttacggcacggacttacgtataggcaacaaggcggcgaagacggcggcgttttgccagatggcagaatatgagaaacgcatatccagtgtcagtgatgttgctgaaagaatgtgttggctcgaatcgatcgatttccgtttgaaggtagagaagtggtcacagagcgatacgagctggaaaacagtgtggtgtttttatgatgtgctcgcacaatcagatacgagtgtcgcgcgtgtctctggagctttatacagctcttctccagaggtatgtaacgccacgactaacttgaaacacccctgcccgacttgttccccgcgaggagaaagagtttagctttaccaaaggaagtcggagagaaagcccatgggatgaataatgctcggataattgcagagaaactatgtccgcacagattgctaggcgtcatacgtggtagaccgcactgactgttgcggaaacgtacaagctcgtgcacagtcaactactgacttctggacgatagtggacgttagtgtgggatgccgtaatgtcgatcgatatgaataatctcgttggtggatatcatagataagtgctagtatggtatgtacttgtacaaggtcatgccaatggaagcagtattagaccgtgcggtcgaacgatcaaacagtctggtctatgaaataagtcaaaaatttggcattgtcgacgattaccgcagaattgatctcgcgctcgtatcgagattcgccgggttgagcacgagcgtttcggccgacgagaactcccgagtcacttggagccagagtatacatggtatccgactcgagcgggcccgtcagattgcttttggtcgccaacagagcaggcgcggggccgtttctgatgactttgataatgtcgtcgaccgcaccaaagttggggcctcctttcgcattaagggggacagcgaccgtaagagctttccccggcttgccgagaccctttttccagagcaattgtgccattttctgtgtctaatttccaacgagaccctcgatcgcttgattgaatctattgtttgttggaatgtaaatttcggagtcgtactcaatgttgtcccaactcgaaccatcttcgacgagtagatcagccagtctgtcctgtgtctgagcaggccatacactgccgaccgctgcatcagtgaaaccttggaaaagctttttgctgtttatgcgcgggttcgcgagcccgaggatcgaggtggtagcttgccagtacgtccaatcagcaggagggtcgcatgtagtcttccagtttgtattgctaccgtttttctgcatgaacatcaaaagcttttcgatgttgttcggatcacgttcgacaagactgcaaaacaccactcggacactcagttggggcgagattcacatcgtgtcccggtctcactcacgatcgcaacaaggtaagggatcccaggtcatatggcgcgccatgatctagaagagcgcagtgcgggtcagcgtggatgcgatcgagtctcgccgatgaggtgacccacacgtttcgtttgtcgacgccttgagatcagctggactaggctttccctggctgttgaagagaaagtactcgtggttcccgtattcctcgggtgaaaagttgcacttttgctctggtcgattgccaggcgttctgggaggtggcggggaggctgaacaatttgcagaggttcagcccgccgcaatggagaactcgatcgacgaaacttaccgacgatggattgagacaggccgagcgtggcgacaaggaatgctgtcaaagaaggagacttcattttcccaagtggtaaagaactttacgttgtcagggttgagaggtgatggtaaagtgaacggggaaaggcaattcgacaggaggataggaatggatgcgagagcttgaagatggaggagccatgtggagcgttccgaaatctgggttcctcctcgggtgcgcagccttatatacggtccgccctggtctttccgaaacccgacccggtatgccttcaccctaacggtatcgtttcatggctgtctcaatgtcgtcctcctttgaaagcagtccggatgtgccaagaggatcgtctccgattgacatcgcgaatccacgtgtcatcactcgtttcagatctagtcgagacggtcgagctaaagctgtaaagatgaagggaatccacccaggtttcgtaccacaggcatcgcgtagctcacgttcgaggcgcggcgctttctcttcttgcctaccgcccggactttgattagcatgttacctcttcatagcacagttacccgagacttgagggtgtcatcacgtcgtgcccagggttcccgtacagtccgaggggcctcgccagcgctggagggattatgcgacgagggtgaggtccaacgttcgagtcgcagtcgaagtgcttgatcattccacacccctcctcagcgatcgcgcctgttgtccaaacgaggccgaatcgtgatcctcacgcatgccggctctgacctcatcgatcttctgatgctgacgaaccctcccttcgctcgctcgcctaggctttgcttgatttgatttgataagattcccggttcatcacgatccgtctccatccggagtactatacaacggcccccgctcgactcgattcgacccgtttgcccgaacctatccgtgcggcatcaggatgagggccatctcgacccatcccactcccccccgtgctcctctccgtcatctcgtctcgtcctccaaacgtcgtctccgctccctatcccccaaaaagagacggcgagggagacaggacgcccaacgtccaccgtccactgtctagaccccaacgctaccctcgctcccgctaggcttatacttgatcttctcccactctccagattcttctagtcgacgttgagcttcgttcgtggcccatgcttggatcctgcgagtcggagcggtgcgatgcaaagcgatacaatgcggtgcggtacagtgcgtgtttttcgagagggtcagaggtcatggatcgattggaagtgggttacaggacatccgagttgggccaagacagggcgagttttgaaggcatcgaaccgggatgacgagatcacgcggatcgtccaataaagaatatcgatgtccagatcggaatgcgcggttgtcaggggggtttccgggaaatgtggtgatgatgatggtagggccgatccgatccagtccggtacggtacggagtgatgaggatgaggtggtccgggcaaggatgtggggtacgtcgggatgatatggtgtgaagatggaccacgaccggacgaaagccagagagcagaaggagaagaggaaacgaagaacatgtcaagagatatgaatgagctcacacatacttacttgacgtcctaaacgagatgacccgactcggagcggcaggatttgaaggactcacgaagtgtcgggcttgtagacgagcacgaagccggcgaggaccatccctccgaagaacccgtaatagtacaagttttcccaatcctccttgacgcgtttctgacctgctggtgcgggctaccaaggcaagtaacaccggggacttctagtgtgagccgatccatctagaggtagcaaaagaggacggaagagggactgaccttttcgccaaagatgtatccgctgggttgatggtaagtgggttgactggcgtacgtcctcttggcgagttgttgcctgacgggttgacggagggtgggtagaattgatcggagcatcgtgaggtggtctagacttgtatgtttagatgaggctgttaggtgtgggaagatatcaagtcgatgtcatatgatgatcgatgatatcgagatggatgccagcccagcccaggtcgctgttcgttgactttcatttctttttctcacgcgacaaagttggaattccattggataaccaagtgcaagtagtgggtagtagtagctatagatctatagacaaccaccacgcatcctactctatctcacagtgtacactcagcccatcatacacatagactcgcactcgtctgccagataaagtcgaccaaaagtccggctgttccatcgcgaaattcgcaccccctaaactcgtataaacgtacaacaagaacaagggaatcaatcaacatggctggaggtggacacggtggtttcggtgagtcccgcccacgaatgatatcctgccgtactccctctgtatcaacgggtcgctcgatgaggtactgacaagcttctttcattccctcgtagaacccgtcaaggtgaatacggatcagaacatggattcgggattgtgattggaataggggtggggcttaaggctgacattatattaccttgccttgccttgtctccctcgtgctccagatcgacccggctatcgagcgatggaaccatatggtgcgtcaccctcgtcttgaacccgagaggacaactcgcctcatggttcgagctcgggtgtcgaaggtggaatcatgctgatctgttcgactttctcccccaattcgcacctctccatcttgacatcgatgcggattcgggccttgaactttcatcttgaatttcgaacctcgaaactcgaatgtcggacctcgccaatcgccttcccctgaccatgctcgactcggcctgaccctggacccttctcggtgcacgaaactcacgacggaacactctcactttctctcttgatgggtcgacggtcgacggttattatccgatccggtatggatgcttgtcactcgggattctttacttgggacatccgtactcgggctcgtcctgttacatcatcgtcatcatcaccaacctcccgtctgcgtgcccggcccaaaaaccacccttccctcaacccgatccgacctcgacaacaacgacaatagcgagaaaacgtctaccggaccttcaagttcacccctaggacggcccgtctggtcaccgtctggggagccgtcgtaccgtgcgtggtagccctcggggcttgggctgcgaatgtgagtcccgtgaaagggtcgatgattggcggtcggtggtcggtggtctgtggtcggtggtcgatggttggtggtcgatggttggtggtcgagagtcgggagtcgagagtcgggctgggtgggaggaggtgggggtggagatcctgatcgtgatccggtcgggttcggtcggtcggtgcgggtgaacggggacccgggagtttgggcttggggaagttcaacttagggcccgaagatgtgggcgatggttcgggcgcagagagtggctcgttcgagtcggatggaagggagaccgtccggataggactggtcaagccgactttgaagagatttggactcggatctggaacagattatggagagaggaaggggggtgctgggtcttcctccttgtcaaagaaacgaccgcacgaccccgagctgcctttgaccagcaaacaagcaagggctgcgacgccatccacgcgaacggacccgatcacctttcttccatcacgatgactgcttcccgctctgggcaccaactggctatgaccgcatcccactgagacactgactgaccaccttgcatcctttcctccattttacgactgtagggccaactcgactgggctggcaagcgaaggggagagagcttgtacgcctcggcaccgggatctcagcagaaagaggtgcaggaagagtagagaggggtatttgaagtgagcggaggttccctcggatgacccgcttttgattgtaacgatatggatctcgtgctggaagaatggcaatgaatgtcaagtgcaagtgcgagtgatcgatggtccttgactggaacgggtcgatagaggattctcggaagcagaattccccgatccggaagtgaaatttgattccgaagatcatcatcccagccatcgctcgacctcgttcaggtgatttagaaagggtcaactcgtagatttcataggtcacacaaccatgagcaagggacgacatcgttgtcgtcggatcattcctgcctcgtgtgtcttgactaaaattgacctcgactgcccacgatggccccgatcgaactcgacgattatggcccaagctcgacaacccccaacttgacatcgggtacgggcgaggtcgactccatctcggaccctcttctccgtcacgccaggttcgcctcgccgcctcctgacaatgatgatcatgacgatacaataaccggtgcttctacgactggctactcgtcctggagacgaagcggtaatcgccgtcgaagcggctcggtcaactcgggcaccttttcacgtaattccaggaggttccccctcatgctcgtaggcatcatcggagttcccgtcctcctcctcagcctggtctacggcatcatccgggggaacgcaccggacctcttgcccgatctgcatatccccgacatcttggcgcccatcaagttgacggagtccttgtctcagcgatgcgtttgcggcacggacgatgggaaacgggataccgagggaaagagggtgtgcgaggtctacggcaaggacggattactgaggagtcgattacacgaggggacggggaataggatcaaggagtttatcaggcatgcgaggacggggcagaaattgaaggtggggatcatgggcggaagcggtatgttcaagcccggacgtcgccctctcgctaacagagtgctcatcgcaagtgatcgattttcacggacagtctctgcgtgccacggtctgcatctcaagcccggtcatccaggtggtgacccagcgggaccaggttgctatcccaccttgtttgtagattggttgcacaagacgtttcctatggtgagtctatcgtgcatttattgacacgccatgatgatcgctgatcggattgctcggccttccagtctgatggcgaggaacacgagatctttaacggggccatcggtgccatggatagctcgtattacgcattttgtggggtaggtcgccgaacattctcgcccaaatccgcaaagcaggctgttacaaacttgcgctcaccatgcccctttcgcacgcagacccatcacatccccgaagacgtcaacctgatcgtcctcgaattcgacgtcaacgatcaggccaacatggcttaccaagcctactttgaccagctcctccgagtcttgctcgaactaccatccaaacccgccgtcatgatcctaggcgcctggtcacccctcatcgctcagaaccaagggtacggggatccacaggtcgcgcatttgcccgtagcgcattactacgacgtaccgtatttgagcttgaagagggtcgtctggaatcattatttgaggtggccaaaagaggtcgtcgagacgttttatcaggcggacatggtacatcccaaagccaggggacatgtgggtcgttcgagatacctggcccgtggttgatgttgtcgctcaatatcacttcttcttgaaattctaccctcgcagcgagtcatggccgacctcctcatcgcctactttgaggggcagatatgcgagtacgacctcaacggtgtacctgctaatccgccccaggacgtgacggtcgggacgacgctcccgtttggtgaattcgtcgacgtcgatttcgcctttgagagcatcaaggctgggatggaaaccgagggtgaagcctggaaatcgacgtacgacaccgacgcattggcaaagatggcgtttgagaggaaactctttgtcgagccgctcgacgtcttcggaattccgttcaccccgatcgaacaacctttgagagaggtcgtcaacccggaaaagaacgactcggatgacgccaaacacctgctcgaactcgtccagccgaaaccgttttgcgcagacgccaacgatccggtcaacccgatgaaaccgaccgtctcgatcggatgggaacggttcgtctggatggaggagaaacatttctggaagagcaagaaaccggggtccaagatctcggtggatatcgaggtctcgcagggcaggtgagtcgtcgggtgtgcaagcttgtgctggtcatgtgcaagctgacgtggctcgatcgtcacacagggttgctatctactactggcgaagtaagacactggccggggggacggtcaactgttgggtggacgacaacgagcgagggtctgtgcaagtggggtcgtggtgggatcgtccttataatatggcaaggtgagtcgaaatcgtggcagctgattcgacagcgacctcgtgctgatggctggtcgccctacagcgtttggtacattgacgataaggttacgcctggaaaacactagtgagaacccggactgacacgactcgattttgcattccaacctgatgactaaacttctttccttagcgttacttgcaagctactagaccaatcttcgaatccagacgacgacaaacaacgcgaatttaggttggttgcggtcatggcaacatgatcggagcgggatctagcgtgcgcatcgatagagttctcggttgtaagatagatatatacaggtaacctagcatcgatacccgaatatcctgggtctacacagtgccgttcttctcgagattcttgaggatactttgcctgttggccgcggactgagttgagtaccgagtacagagtatggtccgaagcgtcacggacgaacctccattgacagttgacctacataaggaagggaacagtgccatcaagatcacatccaggggcaacggttcataggcgactctagaacttacctgattcgcgttcctaccctgttgagcgaatttctctctggcgattgccgcgaaatccggtttagccgtagccaggaccgcaagtaacaacgtctgcttgtccttcaacgaccacccttgggctttctttggcgagtcagaaggcttcttcgtgggcgatccagaagaagccttcttcggtttgggcgggggggtcgtctcgccgtccgaccggatgtagggtttggtgcccatttcgggttgagaggagggagctttgggcatgacgaatgagagttggtattagatcgatgtggttaagtagtgcactggatgtgaaccgaaagtgtttgaggagaggcaaagttcggccaaccgctacgtcaaagaagcatatatctattctctaattcaacccgctcatcacctttgacccacccgacgtacataaggaagccattccattgtcatgcttctcgtccgaagtacgagtggtatttgcaatctctccaattcgatgtcatgacgagccatttgacatgtcgaccatgatcgacgcggtaaagggactttgtctgtttgtttgtttcaaaagtggatcgaatttcacaaaaagaaaagtagcgcgacgccactttcccccttttgtctggaaatgagaagcatatcgtggatcaacaaaacgtataaaggcgtcacccgagctgttcctccgcacttcctccacacttcccgttggtcttcgttacactccggaactcccttacctcgctctttcaagcaagaaggcataacctcgtctcgacgtcgaaatgccacgcgctcctaaacaaccgaaaagcgaggacgacgacaccaaaccgtacgcgagccctaccaagacgccgccggccagtccgaagaaaaccctcaacatcaaaaagtggagctacgatgacaagctcgacatcttgaaggacatcttggagaccgcggttcctgactgggagaagattgcgcagaagcatgagggtaggaccgcgaacatggccaaggaccaatggcggtgagtggcgcggtggcttgtctgtattaccggctcgcttgactgacgggatcttgctgcgctgctgtctagaaagactctcttcccggccctgatgaagacgggaagtatcgtcggttccgctggaaaggctggggattgagacgggaaaagaaagtggctaggcttttcagaacccgactcgagtcgtctcgcttgtaccgtacgaaatgctttgagaataatatgtcgttcggtgataggaaaccgggccgtttacaggaacatcaatggaatgctgtggaagattcgaagacaaatattcatacgagttgaaacttgagcaagagacaaacatcactccgtcttcatgacccttccttccgccttcgccgtcggcaagatgtgctgcctgtaaatggaggatggggagactctcagcgcgaacacaggatgggaaccagtatattcggagctgacctccattgatcatgaacctggctcttggtgcgcccctcgccgaattcatcggccatggcctttatccgggggaaagaaaccagagtttttagtcgagacaagagccgcatgtcggtgctgctagcggctcacctgccagtccggggtcgctgtctgtaagaccttcaagagaatatctatcttgtcctgtttggaccattttttcgcgttctgtttcccggtctttttcggagaagaagagggagacttttttggggaactagcagggtgcgagtacggtttgacatcgaccgtgtcgtcgtcgatagaggaagtggcgggaatcttgggcatgatgtgatctcgatggtccaataagttgctgggaaggtcgttctggaggcaacggcgacagaaggatgaccggtcattgcttcccatagacctttatgtatatatctgaacaaagagaacccagtgagtgggaatctcccgttttgtgtgactcgtcaaccgatggtgtcacttgggtactcgaccgaatcgccctatctgcacgaccgccgatctggccttttgttcgtttcgccgaaaggagatggcgggatcttcagtgtccatatatcaatgggaagagatgtcataaataagcatgacgacgcagaatcatatagaccgacactccgatagcacgctcacgttattcatctcacacagcgactgagaatagtagtacgagcagacctgtcatttaccgcaaccccgactttaacaatctcaatttcgaaccatgccacgcacgcctaaacgtccgacgacctcttccgaggacgatactaaaccctacaaccgtactccttcagctcctcccgcatccccgagtaagaaggccaaagggtggaccaaagccgataagatcaagcttctcctcgaagtcattggatcgcagaaagccgatttcgatgtgatcaaagacaagttcgaaggcaggaccaggagtcaggtaagagtgcatctcatagctcgtagaccaagtaacccacgaacaggtggtcgactgacaatgtgtttcgtcgccgttcaggtctacgatcaatggcagcgagtagcggcacacgactcgtggaataacaaaccgctctgatcgccatacatgtcccttgcagtcaacaaatcttgcctgcgctaaagagcaatggctctgtcgaagggagtgctaaattggcggaatgactcgtagtcggaatgacatgtatatgatgggggtgatgatgatgatggatgtcgacggatacaaatctgcaatcgttcaattacgggcaagaaagtggggggtatggatgcccgttcggattttggcggatgatggaggatgggcagtctaggtagccgacagcctggttggtttgcaaccggtaggaaccgctgcgatgcgatgcagattcaaaggtcgacggcaaggcataccttgcacaatcaatccccaccagaccactgcaccgaagtgatgccacctatcgcattgctagaagggaagcaagaccgacgcattagtagtaccaattcgtgcaaacctgtcgcgacgatgaaagatcccagccgagtttctgcgccaacgatcccctacttctggcccttgatgtcgacgatcttgtacttggtcacggcggcttcacatgcggccgcattcgctttgcagttccaaaccaacgcgtcgagcgattcgcgatcgatcttgcgtcggttctcattagcatagatggcctgcgtgatggtatgcttagcggtgggtgttgaaaagacggtcgcgtgatgtttttccaagaggttgcacaggtcgacttctgtttcaggttcagcgaatccgagttctttggagaggaatcctaggggtattgtcatgtacctaaagtcaggatcgagtatcagcgagacattccgggcgcattacatcagacgcctggggacttgcgatttcgaaatctttgccagggccgcgacgcgttcccgttcgacgaaatggaccatcaacttggcgttgtaaaacacgggctcgacgaacaatctgaaaagccgatgatagttgccagtcgtgatggccgcgtgaacggcgagcgcatgggcgatacccttttcccttttctgtacgggtgacagtctagcaatcgcacgtccgagctctgaaggggcggtgggcttagcgttcgagattgccggacgacgacgacttggccgttcgactcaccactcatgttcttggtgtggatcatgtacaagatcctgtatcccaaaaactctgccgcacatccgggcaaaccgtgttcataaagctgtttaaggaccgactgacactggttatactcgcccaggtcggcctgcgaagcgaaggtgaacgcgaggagaaagtcaatgcatattcgcccctaaaccggtccacgacgtggactgacggattgcagagctactcgagcgtgaaattcgtataccttgaccgtaaactcgttcttgatccgttgcacctgtgcgttgcgatcacagattcctgatcagacggctgttcggacgggcaagaagacgcggcaaaccgactgaccgtcagatcctgacgcatactcttcaactgatcgcagatccaggggtatggtttttcctccgacttccacttgttcttgatatgcacgagcgtctgttcgaggatatgaagtggtcgaatgttggccgggttgggtgcctatcgcatatgaggcgacagatgcggcatgtcaatctcgggttacgcgatatttacccgggcgtcgctggtagactcacacttgtcagacggaggtagctcttttcaatggtcgtgctcgtcccctttatcgtatgccgatcccaattgatcacattctaccgcaagcgataaggtgcttcaacaaccgagtcccgccgccaaaccggacctggacctggtgagactcactggatccgcctctggttcctcttgtccgtcccatgaaacccatcccatcccacccgacccttcctcggtcccgtcatcccaaccgccgttcaactctctctgcttgtccaactcgatctcccgctcgaacctcctcgcgcgcttcaacttggcttgcgtctcttcatcgttctggaatagctggacggcggggaagagcgaggtgtttttacgtttcttggtcttgctcgccggggattgttgcgtcatcgcggtaggtttcacggttgaggtcgatgccgaggcgtacgtctgggcaggaggtgggggtggagcgccgagaggagggaattgcgagttggagaacacgttaggaggttgcaagccctgtacttgtgactgtgattgtgctttcgtcgtcttcggcaggccctttcctccaatatttatcggggcgaacccgccattgtttccaacggtcgggcgattctgtcctgggttgacggtcatgatggaagccaatttggccaggctggggcaccataccagagggtcggcctgactccaatcctgattgatgatcgtcgggtccttgctgaacatacgtttagcgatctgttcccgtatgcaatagcaggtcaaagtcagtccaaaggtcgacgatcggtgtaagtcgtctcggggaagggacgggggtacgcacgactttgatatcttccgagacggccgttctgtattgtgtcgtcgccatgctcaaggctctcgacacgaacgccctgggtcatgtcgtgttcgtcagatccaacataggaggcatcgtagagcaggtcgagtgcaagtgcaggaaggtttcgcgtggtcgggttcagagtggaacagagagcgatagcggagaagtaaagagaaaccatgagcatgcgcttagtactgcacccagtcatagaacaaagtcttgatgcgagacgagtccccaaggacgatagaagatagcggacggcactcacttgaaatcgtccctcgacatggcggacatttcctggatctacttttgaagcgatcgttcggtcgccggtgaattagagcagtgttggagttgctgtagcgagtcttcaggaccgggctgatggcgagaggagtgatggggaggatacctatatcgtagttgatagctaagtgtatgatcgagacggatggatggatggatgggcatctatggcacgagaccttgctcaacagatacgcgtcgcctaacatcgtcccatatccatcatgatggtatagatttgtatagcatcgtacatcgtcaacgtcagagaattggttgtcaaaccacaatcagtgtcggccaggtgaaatgtgctcagtccgaggagtatggctacagtgtaaatgttaaatttcgctacaaattttgacccgaaatgcccccctctcctgcgagactggtccgtcacgcttcgtctgtcgtctcagcctcggtgcgttgactgctggggtgatgcctcggcctagtaacctcgacaaggttgttcttctctacccgggcctgtcccggagggtctctcgttgcgtccctttctcatggactctagctcgggacgagaggcacagggagagcctgtaccctggccgtcgctctttgggttcctcgccgccgccatggccccgcaccctgctacgccgagatgatctgcatccaccgtttcctctcctctcgatcccgcttggcttccctcttcgccctcccccgacgtttcttttcgagatcctcctcgctcaacccggggacgacttttcccctctgcatcgccctgatatccgccgacgtatgagtcacccgcttcttcatcgtcgagctcgatctgccttctccctcggcctgatctttccggacgtgtggtttgagcacggatcgacgatgttgagggatatgcccgatcccggcgaggtcgttcttcagataagtcgctacgggggctacccggccgggtccgatgagactggtcgtcgacgtcccacgggattcaaggtcggcgaggacgagttgttgttccccgaacctgctcggtcccgcacctggatcatccaggtcgataggtcgtacctcgtcgtcgtcgtccagctcggtaagatcgataacctcatcgacatcgatgacgaccgccttgccctctattccctccccgaccgattcccgcttgacctcctgcgcatcctcggcctccttcttgacccgccgagtggcctcttgccacccttccggccgtcccaatccacctgtcccgatccacccgcccttggtcaacaacttccacccgacgttgtccggtcggatgtgaaagtgcgtgggaggttcgtaaggtttctcgccaggcggggggagagagagtaaggaggccagggaggacgatttcgtacggttcgggggtgggggtcccttgttctcaggtcgatcgggtggttgcttcgaggtgtttgagctagccgggtcatttagagacgttgaccctgaaccatccccattcgagctgatcccaccgacctcctttttctcgtcctcgtcctcgtcctcgtccacggtaccccccacctccatctcccgcttgaccctcccccgctcttccgcctccatcgcctcctttttggccttggcgagtaaagctttcctgatgaaccattcggaacggggtacgatcaggtttctcgaggacgatgatgacgacgacgtcgtcgtcgacgtcgttggtccagaggtagatttcgagtacggctcgtttggtctcgaaagggaagaggtggaggtttcgtttggagagtgatcgggatggccaggttggaggcgagaggtagtaccggtcttgatggcatgatgagcgttggaaatcatggatgtcgacgtcgatgttgatgtcgatacggtcgaccctaaccccgatcccgagcccgatgccgatgccgatgccgatgccgagcccgagcccgaatcgccccaatccaacctcttccaaaaatcaaccaccccttccctccctaccggggataggggggaggggaaagaggtcggtgctcggatgttcggcggtttctcaccgttggttcgctatggaatgttaccgccgagctgtgccacccaggttcagcgaagagggtacgctagcagctggcagcgcttcatcggctcagaagggaagaagcgttgaaacgtcgtagttgcaaccattgagccggttcacaaatcggactagtaaattcgcgatatccttccaggattttaggtcgttccccgggtgtcggataggagctcttgcttctgctctcgctagacgagtgagaattcggtcgacgggggttaagctctcccagaagcaggctttccccgctagcaaagaaccctcgtcgagcacgggacctatcgatttaccgctctaccatcacactagccctctaccgccgcatctcccgcgtgatcagtcatcctcgcggagagcaattaccgaccatggcagagtacgccacatgggaagagccaagtcaaaaacacacaagattcacgggggatcgcgctgcaccgaaagatgtctcgctcgacgtgagcccgacaagccgccgatccacgggggattccagcgcgcaatccggttaccggcggaagaaccggaggcaaatttagagccggcggaggatgaaaacgcataaattatgccggacacaaatatgcgttttgctgcttttccgttgcaggcagctcgacgaagaccgatcgaaagagaaatgctgaaggacgacgagctcgtgatgcacaaacgtcaacctttgatcgctgcatatctttgagcgagtctaatcgcctgtccatagaattgcctgttgagcttgatcatggtcgagcaagatcgcagcacacgacctgctgtagattctacaccgttcgcagagttggtggatcaacttttgaaccagcaaaacaaggtctctcctacccagcttgacgctcttgccaaaggtttccggcgtcagggaacggatatcgccaagcaaagaggtggaatcaaggggggtatcacgggcttcccgcctgccaaagcgcaggccttggcagattgcatctacaccgcgtataattccgcagatcgacagacggttaccaaggctggagatgtcgtccaggcactcgctgctttttgtcgagccatctcgatcgactcagaagggaaggatcagaatcgtctcctggccgaatccttcttgaggaaagctgtcgagcgggatcactttgacaagcacgacctgcacgtgttgaaccacctgttgcctcatgcggggagtcagatatggccggacgatcttatgggccggatgttcgtcgagacttggtcgaatgacagtcggttcgtcgccggccgagtcatcgtcagcatgttcgacgacgaggattacctcgagagagtctacaaggggaaacgtggatcgacctcgacttcgctcaaaactaagcgggaagacttggtagccgacatcttgctcgacaaggtcgccaatacggatcataacgtctctctgaaaccaatctctcagttcatcctccccgtgctcttcgaaaatcagcctcaactcgtcgacatcctgttgaagcggacgtcgatggaaatcgagagactcaccatcctctccccttcagcagccatacacttttggtctagaatcgccgcgactgccaggacttcgtccctcatccccatcaacgttttgaacgagcaaaagttgcagatctgcatgcatcacgcgatcgacgacgtcaggctggcgtgctggacgactttgacggcgagcaaggccgcttcggatagggtcgagatcgaatgtttcggcaggataaaagagtggttcgagagtaacatgcgggtgcacaatgccgagtgagaacgtttacaccggcccttgtcgattgagggctttgactgatatacaacgtgaacagcttccgaggtactttcagcgcagcgtttaggaaatttgtcgagcggctccgattgtcagcgtcggcagcgcagaagcagatcgacaagccccttcctaaaaatcgacagggaaaagcggaagaagaacgtgcctggaacgacgaaaaggaatcatctcggatttacatcgctgcggtcctggatttcttgcaatacatactggacgaggtcgtgacgaccgccctggaattcccttcttcgaccggtcacgccagggtgatcaccgcgctggatatgatccagttcttggccctcgaactcgaacctcactccttggaaaaggactccaagcgaaaagtcgctttcccgcccgttttcactgaagacagggtagaacacctactggcttgtctcggaggaaacttttcggatatcagatccagggcgctggaagtgtgagtacaaagatagatgactgttcccaggcggtgatactgaagtcacgttggacatgtcccagcctgatgctggctccatcgcctttgcctggctactcgtctgcgggccaaaaacagaccctactcgaaggtgcatacgcacggttggatggaaaccgcaagtccgatgccgaggccgggtcgttggtattgcaagtcttgtgtagggaagaggagaacggcagtaatgatcgcgctatcaaatacgtcaccgcccttttggaccgattggatagcagcatacgcggtgcggagcaggagctggctttgggaatgcagaagcagccgatgcatgggaccttatcagcgattgcgtgagtgtgaaactgtggttgttgcatcaaacagctctcaacggtcttttctatatccaggcggatcatttgggccagctcatgggatcactcaaaggtatcggccatactcgagtcgatttcaaaccggtgcattgcgcttgttcgccggatctggaacttgtctaagagaattctgagttcagaaggttcgaacactgcggatcacgagattgctaggatctacgatatgatggaggatggcatggaggatgaagatcaagatacagtccacatcaacttgttatcgaactgttggcgagccatcaaggaatcaaggtgagtcgatacatatcggcgacaagatctcgctcgcttacgtgaacaattgaatcacgaagcaatctcattgccaacatcttcgtcgtgacgatgacggtaaaacccaacgatcgtcactcttactggacttcagatgacgttcgcagtatcggagagatgtatctcggctggctttatcacatccgacatcgcgggacgttctcctccatcgcaccagactttgagcggttcgtcaacgtcacggcttccgttgcggcatctgccggaggtgatcgaactttgcgccatgaatggctagaggttagtcaatgcaccataactgtcagcttgctctctacttgcgctgataaaccccgcacatctgatcccatcagagccaattggaggtagtcgcggctgggaggacttcgacgacacggagatcagcggccattccagcctgcattctcgctttggtgcaagcatctcaacctctgtttttgcatgctcatcagcggctagtcgctataattcaggccgaccacaccccggatgccgccaaggttcacgcattccatgcgctgcgagtgaccgtgcttgatgcgaggcaaagtaaaatacttggagactgtttcgaacgtactgccttggttgcgcttgcaggttgcaagagtgccgagtgagtcgaggacagcgcaggaacagggaatcgaggctaatggtcttcgctcataaaagctggagcgtacgaaattctgctctcttgctgttcgcacacctggcaacgaggatgtttggcaaggggctgaatagcccaggcacagtgtacgacaagcgcatcggtatcgtcgaatggaattctcggtatcctctcttgctcccttcctttgtgaaactgctggacaacgcgaacgtgagtcacgtacgtaagttttgtgcgtggggcttgataactgacgtgctcgtctgggtagtcaaacaacgatatcgatagttctgtgattctcgtgctggccatgttgaggcatctagaaagccgatatacctcagaagaacaattgcccattcagatcgagcttcgtaccctttgcaagaagctactggcgagcccggaaataaaggtaatccgcctccacacagtcaaacgagcagactggctgactgtatggctcttgatccaggtccgacaagcggcagcagaggctttctcgagtttggagccaaaacagactcgctatgcacgctgtttggatctcctcaacatctcgtacgccagtgccaatgagtggcatggtagcctactcgtcatctcttctgttgtcaaccttggcgtggagatggatgcccagcaagcggaattcttcgtaaagacgctacaagccagcgttcaaaacggcccggtctcgcctctaatcgtggctaccgccaccgaaatcctaacgcgatgttatacggtgtcggggccgtcagctatctcgttgaagcaggatggtgttctagtctcgagagaatcactgcaaccgggtggcagcttattgcgcaacgcttctgctagacttcgatcaagcagactatcagaaaacaagcagaattcggttgtggctttgcgccaggctttacttcctgggggcagtcctgatgaccgcatcgaagcactcagaaatatcgatctaggcagccaaaatgaagtggatatgtcggatctctatcacaggctgagggcactctacgacgtgacagcgcatgttcccttgaaagaggccatattacctgcactggccacaatcttggtgagacccaattgagactgcaacatgtgagctcaatcctaatgatattgacgttctcatacaggccaaaattcccactagcaagctcgtgtcggatttgaacagcctgattgatttcgctcttgatgaaaatcgagtaagcttgataccgggggttctaattcaatcgggcaaacactaatcatctgagattccacagtcggcggaatcacggttcgcggcttctcttgcgctacgcaacatcactcctggacttgagcgcgagggtcttgatgcacagaccagggtgaaaagtctgatgttgatcaagcgcgctctttccgatgacgacgcagaaattcgagaggttgctgcggacacggtctcgtcggcgacaaagagtggttacagcttgtgtcgtgattacgccatacaggcatggtggtcatacatgcatgagcaattttcagaacatccggaatggcatcgagagctcgtccgtctgcttgtcaacaaagacctgataagtgagtttatacaaacgaagcaaatatgacctcaccgtgctaagattctccatactcagatcgtactctggatattctgttcaacccctccgacgatctgttcgcgagcgagcccccaaatctcttccaggagcccgtgattgagttattagaggccttcgaggggtatcaggcacttggagatcgggttgcattcacgacgcaagagatggagctcatcctcgcgacacgtacgaagctagagaagaccgttccaaaaaccgactcaatctctcctctcgatgctgggagagacgagcggaaacttttgcagctgtatctggcgactctgacagacatatcaacctgagcggatctgggccgccggtcttcttctcggacgcagcttgaccgccgccgccgccgcctatcaccttgggcaaatatcaaacgggatagcagtagctttcaataacgccactgatagggcaggatttgcatttaggcgtcgtagcatcacacaatcttcgaaagttacaatccggcccgtataatgacactagtacacaccacatgtaacgacgatcgataaattttcagcagatacgctttccaaagcaagcacaatacacattgttccacctggatcccatgaatcgttctgacagctcgtcttgcggctcggatcgttgactagacgctgtgaagctgccaccgcggtgaaattgctcgccagtcaactccaacaacggtcttaggcggatatcttcccgatagctctgagacccattcattctattctgtttctcgccaatcttgcttgcgctcgatggcaacagcgagctggtcacggtaacctcatctatggattctctgggatatagggcgatgtccctgcgagagcttgcgttgggcaacgcttgcggtgattgatgagcgatgtcggacctcaggcgagggaagttgcgatcaggagatataatactgatggccgggccgtgactcgcaatggcagcgcttaaagacaatcgtttgggcgtttggagatgagtggcgtagctgctagatcgactcatgtgaggcgatggcgtggacgtgtccgattccgcgttctcgaaggccgagttacgctttctaggcggaggcgttgcagtcaagggatcggaactcgtgagtgtttgaagattttgactttcggttccggttgtgaaatgttgtgtttgtgcggatgtcaatttgaccgacggctcgagtaccgataggtgttgcatatgctgctgttttctagcttcgttcatttgggtggcaagcaaagcgccttggcttcctctagacccagtatcgctcttgctagctcctgacaacatgcttagtatgctttgatgccgttctgacgggggcggagagggaaaatggaaaacgggcggcgcattgttgaactgagcaattccgtcgccagaagcagcttcatcgctctcggcaggacgaagtcctatgtccagctgttacagtaccacttgagtttgcgacacttggaacggtttcgaatgctttttctcacctgtgataagctgtcaatattggaagagggactctgcgccatgaaagcatctcgctgacggtcggctagattcggtgcgtcagggaaagttgcgttgtcgaacgtcccgagtcgtaatacgccttcggatctagtgccggacaactgctccgaatagtgacctctgcttaccagatccaggaggggccgagatacttgaccttggccttcgttcagagcgattgtgaacccttcagaattgatctctgggctgttgtcgctgtcgtactcgctcgcgcttgagtagaagcttcccatccgacccatacctcctgcgtgatcaatcaagctaccggattcttctaaaagagaatgatgactgagtgctctctttctgggggagaggagtttggccggactggtcaagacgtcgataccatatcccaacaatctctgtggggtagtcatcggctctgattctggaaggcgagatttggcccgagatgggggcgtgcgaggcgatgaattcggtgacaagatgggcccacctggtgcgtcttcgtcattatcgctgtctaggtgtcgagatatattggctcttcgctgcagggggctagaaatgaatgtatttcctggtgaggattgacggttatgaaacgcggcgtcactctccataatcggggtccttgggctcgtctgttgaaaggtcgaaaaaaattccggaggcggaggggtggcgaaacccccacggatgatggagtaatcccaatatcccgttctggaagccctaccgttgtctagtaaacggtcttggcgatttcctcgactcctctttctctcctcggacggttgggaaggttccaccaactcttcgtccggtatcccgggcgtgacgttcaatggcgatagtacgtctaaatcgtcttgcatagctcccttgaccgtttcttcgctcgagcctgaatgcaaggtcggactgacttccgcactcagactccgggtccaggcgatgacgctgttactcctctgattaaacggctcggaatcgaaagggtcgcatttcgcggtggctctcggcgtctcctccaacgctcccagagcttcctcgttgaggatcttcaatcgcttgcctagatcttccagttcgttcggtcgcgcttctccatgtctgtcgtcttggatgtccatctctttgctcaagttgcttttggccggggtccaggcgagaccatcagcctcccgccccagaggtagtacaccggacctgagggacctcgttgcaaagacggtagaatcaaggctatcctttttcagtgcacagaaactgctatcggtcgtggtcgtctgttcggcgaacgagctattacgcgagatcgcgctcatcctgataggtaccggagtggagaggtcctctcctggctctgtggtattcttgagattgatcgcgaaaggttccagacgagacaagtcgaggaacagaccgggtgggcgatgaggacgagagggaggagttggcgagattccgtctatgttcatgtcgaggaggttcggttcggtcgctcgactagcgacgtgagggttttctagattgttgttcaccgcaatccgagacaccgccgtaataggcactggttggctcggactatcggcttgaatctcttccttccgatgcgacatcaccggcgaaactcgtccgacctcatattccttgagcgcagcttggtccatataatgctccaacttcatgcctaacgctccataccgtctagtcggggagactggatctctgctgatatcggcaacagcatccatgtcaactgacgttgacgaatctttccttaacttgggttggtctttatttggggtatcgatatgcgacgacgaggccagcgatgaaaccgatccggaagggatcaatccgaggttgagcgaacccggggtgatcgtcatcgggatcgtaggagcagatcgaaggtcgtagaaggtccggggtggatcttgtatgggtggcgtgatagagatggggccgatgatttggggtgcggattgagacgtgctggtcgatgtgtcaggagcctcgtgtgcggtcatccggagaggcgctgcagattgactggtcgagagcatctccatgcgattgatcgtactactttggagacctttcggttcggtacggatcccatggttggacaacctgggcacgggtttccttttgatcttctgtttcgtccggaactcgctcatcgaaccgaccaggccttgagcggatctacttcgtctcatcatccgtttccgatcgaaatgaggataggattgagattgagcttggtcgagcatggacgcgaggttcgcggtgttcttggtgacgttcagtggggaggagatggacatgtcgctgagggatggtcggggtagtgtggatcccggggcggtagacatgcgttttcgagatcgggacctgtgattcgggtaataattcggtgagtgagggtaaatttgtggcggtcttgcatcgaactgactgaaagatgcctctcgaggtcgatttccctccagactcgttgatcgcggtgacgtccccgggctccgtcgacaattcctgctgatccagcgtcttccacaagacgggaggtaggccgaccatgttgttttgtgcggtagatcaacacttgctagacctgataaagatcggaacggatcgattgacgacctgttttcccattggatttgatcgacacgatggttgatgatcgaaattcgagtagaatctgcttcaaccatatctcatcggtggcgcccgtgaggcaataccgtaggaagccagtatcgatcgaaaacgcataaaatggaattgaaccgaattatgcgttctcacgtcagatcatctccagctgtgcacgtcatcgagcacactctactctgctactctccgtattcgattcttgacctcggtctgtccatctcacctccctctgacttcggattgcttcacgatcactcaattcacctcctcatagctatcagagagtcgactgccagtcctctctttcggaactcctcactcaaacgaatcgcagcatgtccgtcgcaccggaagtccaccagctctccatcggtcctttgaccgctgcagccttttctcccgaccgcagccgtaagcatgcaccctgatcgcaggagacccacaggacctttccgactgattcctctcgacgctcgtagagctcgctacgtgtgccaatgacaacgacgtcttgatctataacaagggtcgggacggctgggacctctccgctaccttgtccgaagtgaggacgagcccttcaacttcgcctacgcacataaacaccccggctgaagcgcttcagtatctgttctctcttagcacgacaagctgatcacggccatctcctgggctcctcgtacgaaccgtatcgtcacctgctcccaagaccgaaacgcctacgtctggacccaagatcaagccggggaatggaaacccgcgctcgtcctgctccggatcaaccgagcggccacctgtgtcaagtggagccctaatgaggacaagttcgccgtcggtagcggggccaggtacatccagctcctgtcacccgaccatgcagagtctcgttccctcttgctgatgagtttgctctttggtctcggcgacgtgacgtgataacataggaccatcgccgtctgttctttcgatgaagagaacaactggtgggtctcgaagcacttgaagaagcccctccgatccaccgtcctctcgatcgattggcacccgaacaacgtcctgatcgctgcagggagcgccgatgccaaggcccgcgtcttttcggcctttatcaaggggatcgattccaagtgagcataacgctaggaaaggttttctgtgcaaggcgtatggttcggctgacgcttcgaccttgccttgcgatagacctcagccgtccgcctggggtgaaaagttgcccttcaacacggtctgcggagagtttagcagcccgaatggtggttgggtgcacgacgtcgcgttctcgccttctggtgatgccttggcctttgccagtaagcagcaacataccgacctgtcgcctcgatgtgaatgttaacggtcttgattgcgccttaggccacgatgccgcgatcacggtcgtctaccctgctggaccgggagcaccccctgcggcagtacaggtcatccgatccgtctcccttccttacgtctctctgagcttcctcaccgagacctcgctcgtcgccgccggtcacgactgtcagcccgtgctcttccaaggaggtgccgacggatgggtcatgaccaagtccctggacgaccccaacgcgaccaagtctttgaccccgcagacgaccggtgccgcacgggctgaaggtagcgttggaagactcaacacggtcgccttcaataggttcaagcaggccgatacgaggggtcagtcgtcctcttcgggaggccacggcggtctcggaggtgcacccggacagaccgagacgggcgagctgaagacggttcaccagaacacgatcacccacgtcgacgcgtacgagtggaagaacgacggagcggtgggcaagatttacaccatcggcaaggacggaaggttggccgtctggaacgtctaggaaaagatgtgaaagcgtatgcaaaggcacgttgtaacggaatgattcagatcaaattgacatgcgctcttgactagggcccgccatgggtcagcccgaccccgattcctttcatcacgatttagagtctagtttatgaaaacagagcggaatactcaaatctcctagactggggctgcggttttaactttctaaatatatcggatgcactttcagtaaatcgatcagttgaccgtttcgcaagatctctgaagacgccggtcatggatgtgggcaagcagtctccagagatttcttccttcagggtcggttgcgcactgcaaactgcagccagtgccatcctgctgctgtggtctcaacagatgtgatagatacgccagccgctctcatcaagcgtcttgccatactcgcttggccacgactgaatttttgcgatttaaagcgcctggagaaatagtttgcagcaagatctgttcggcctgagctcctgtcatctgatcatggaagtacatgcgatgctgcataacaagtgacctaagctaccgcggtaaacaggaacacaaatcgatcaaggacagcgcgtcgaaatcgctttccaatcgagtttgtcttctaggtaatcgacctcggccgaattctctgtagctagccgctgcatgttcacaagatggcgcatggttggacggccatgagggcaattctggattcgcaaacacatcagaataatggagtcgagtcggagaccagggagaccctgcactcacccatggatgttcaatttcacccatgtgcctcgtcaccgattccatctgtctggcgtttagtgcgtgaccgaacatgacactcttacggcacgctcttgaggcaaacatggcccgagctttcttgcaccgaaccattgttccgatgtattgctcttgcagcaaaaagatcaattctttcaggtctgcgaaagtggggtttcttgagtattgcgatcaaatgatcattgttgacccccaaacttgcccttttcgtcaaacgttgtctccttgctgaccggcatcgcgatcaaccggatcttctctccttgaccataaggcgcgtcttcgtcgaccgtgatgccgaacccgtttgagccaaagatgtcgagattttccatcacggtgatctcgtcggcggcggtaagatctagctttttcggccttcaaaggagtatagtaagggaggtcagccccgaggtcgaagtatcgattcttttggcggtcttactgtattaatcgctgggattgaattttggtgatggcctgtagcgtttcgaagttgtatttctcatcggccgcatgttgatctggaaatgtcagagtttcgtaagctagatctagctcgataacctggaccggctcaccaatgatgaagaggtcgtccgagctgccttcaccctcgcctgcttcgacacgccttcgagcgatgatgaaggccttgttgtattgacctataattcgcatacccgcaaagtcctgctttttaatgactcgggagagcgtccggtcgacctcggtcgaatcctggttcgaaaccccggcagctggcagtatttcgctcgtgcgatttttgctcgtggcgggatctctctgccggcccgcgagaccacgtcggcgggctttttgaaacgactccctgatacggtcaaggtcgcaggaaatcaccacttcccgcttgctcgcacgagtcgcgatctcgtcccgaaattcacggcgcttcgaactttctccacgtgtggctgacgtctctgcgatgtactggatgggatcttgcgtctcgccttgctgttcgacttcgctggctctcgatggccggccgatcccaggcaggtcgatggtactaatcagattatctcgaggcgtctcatcctcttcctcgagcatggtaacgagatcgagatcgatgccctcggaattaggctcgttccgctcagccacatctggctgtatcacttcgacggttcttgtcacccgagacgcctcctcttgatcgtcgtcttcatcatcactgtcactatccgccatagtggtatcaactttggccgtctggctggcgaacccggctaacctgtctcgaaaagagagcttggtatcacgtctcgtcggcttggtggccggagcgcggtcggacagattgccatcgtcttgctgacgggtcaatttccacccagctccaaggcctatcagagtcggctggacgagcttggacggtccacgtctcggtgcctcgtcgttgtcgctatccaggacggacacggctcggtgagaaccgccatccgggccggtaacggatcctgcctcgtttcctgaatccatcaattcgtcgtcttcctcctcgtactccaacaccttccgatcggttggggtaaagtgagacgctggcaaggcacggacttgggaaggcgttccgggaagtagaccattcgcagcaagaccgtcatgcccggtcctcgtcggggtgccaccgaaaggtctaggcgcgagatcacgcaaaggcgaggtcggtgacggcgagcgagcgctcctcgtccgtttcctaggctcgggactgggcgaccaggttggtattggtcggtcgcgtttcagcgatacctcgcggggaccttcctccgactcggcaacttgtactgcttgcggggtgtacggagatgcctctttgtcagcgtggatgatggaacccgtgtcggcaggacgggatgacatcccgcgcagggtgggagcggagacgttgcgctccaggtatgtgcccctggaaggttcgtaaaagtcttcgagggcgctctgcgaacgccgttcgaaaaacatcacaagagacctctcggatcagcatcccacatgatgacggctctttagcatcggtggagcccagcatggcgggactcaccacgaggctctggatcaagttggcttcactatgtaggtaaatcgtcttcttatccgggctgacattgatatcgactgaatccttgggcaccttgaaatcgaggacgacgaatggcgtttgagaggaattgtacgacttgtacgtctcgttaaccgctctagcgatctgaccaccgatacgcgccgggtatactgtcgaatcagcgccggagattctgttgaatttcctgggcggtcgcgagtctcaccttgcccggattgaaaggtctgccattgaggtaccaatactgcgccccaccccccgtccgtcccatccccgactctgccttggagatcatcccgacgaccctgaccttgagcttggtctcggtatcgagcccctcgcgcttggccatgattcgatcgatatctaccgacagcttcagatcgacgggcatgagcgtgtgtaaggatttgggaccaaagagggaagtgatcgaggcaggtagggagggagcacctgttgttctgaggtggttcgtgcgtttactaccgggaagacgaacgtcggacgatcgtggcgtgatcagatccggcacgacgtcatgttttggcttgtagacgaaaccgacttaccccgccttgttcgccccgtcgacgatcaacctgacccctcgccgttccttggacccggccggatgttcgtcatcatggtcgtcgtcgtcaccaccccacccgcctgaacagggtaccaacccataccccgtcaacgtccctagggctttggcaaactctttcttcgcgttcctctcaaactcttttctcctcacagggaggggctggaagagtttatggaggatgaccgtcgtgccccgttgtctagccactgtactccgagcttttaccgcaggtcgacgtttcccacccacagccccagcgtgaccaacaccgtcgacgctcttatcgtcattgtcgtcgccattatcagcgttctggctttcctcctccggggtgtcgggcaagagcctcccttccctatcaaaagacaatatccgagctagacctttcatccccgtcgtacacgtgatcacctggaccttttcacacagggcacacaaggccgagagagcttcccctcggaacccataagtggttatccgagtcagatccggttgacccggagtcgtcgacgtcggggatgtcgtcgacgttgaaggcgggacgttggagagtttcgaggtatgatgtttcagagcgagagacgcccagtctggttcggcaatcccacatccgttgtcgatgacttcgagcgagtctagaccgttatctttgatccggatttcttttgttcatttcccgggaattttcagcaaaagggagtatacagggaggtgatcggggttcgaggtcgggatgtacaaagtgagaggtcgaggtcagtttgccgggagtgggggggtcgagcggagatggccgatagacgatgagcgcgggaagatggatttcgtttcgaacagacgcccgactacctactcaccgacgatgcttgccccggcgtctaaactgttttccaagagttccttgacagcgttttccaagctgaggatgacttgacccgagtggatcctatggacggaggattggtcgatggctatcgcgaaatcgtggtagagagtagggtggtgagcgagtaggtcgcgcgcgcgagaaaggttgacctcgattcgaaagtctggtggctcacgtctgatcgatgatgtctctgccacaccggctggatcgggtaaagtcgtggccatgtcacgctggctgcaagatttatgtatgtggtgggtggttgactgtgtgtttgctacacggatggtggttgtatgtgatcgatcaatgaccctactcccactactccccgtcccagtctgtcttggttggctgttgagctgatactgttcgctgtaaattggtcgccatgtcaccatattcatagagtgacaagtaacaagtagcaggtatcatatcgtcgacaacctctctctcttccaggtcagacaactgtaaggtccatcagctgtacatacgacaagcgcaagcttagattcaggaataacactctgaacctccacacggttccccggctcgatccacacctcaatcgtcgcctcgactagcacgccatcaacaaaggcacgtaacacgtccacccctactacaccacaccaaaccatccagaccaccgacccgaccacgtcgaaaatgccagaagaacccaccaaacagcagaccgtggctttctttgcccatgaaaaggctcaaaaggctaacaaggtgagtcgtacatcggagcgagcgggtcaggtcaggtcgacgggttcctcgggtcgatagaggttggaggcgcgaggtggccggccacagcgtggtagacgacgccctgacacaagatctcgctcgaccggatctcgacgtcgacatctggccttgatcgacgacgtcgctccctcattcacttgccatcccatctgaaactgactctccaccactaccaccaacacttccaccatcatcacctcctgccgtaaccctctcagatgtgcttcgactgccacgccaagaaccccacctgggcgtcggccccgttcggagtctacatctgtctagactgttccagcgtccataggaatatgggcgtacatatcagtttcgtcaggtgagtcgagcatgatgacgaggggcgagggacccacgcgcgggagcagtggaaacggtactgactcgatacatcgtctcgccccgctcgacaggtctaccaacctggactcgtggacgttgtcccaactccggatcatgaaagtcggagggaacgcctctgctaccgacttctttacgcggcacggcgggtccgccctcctcagctcctctgacgccaaagccaggtacagctcgtccgtcgccgataggtacaaggccgagttggaaaagaggaaaagggaggacgagttcaagtgtcccgaagggatcaggatcgagggcgtcgacttgaacaagacggtcgtgggttcggggagcggggcgaactcgaggacggggacccctgtgcaagggagacagggcggggagggcggtagggccgggtcgagaagagatcgctgggcacctgaagatgcagatgatgcatctgcatctgcatcagatgcattcggtgcggacaaaccaggcgtgacagcctggttttccggcttccataagtccttcaaaccagagacccgcccgagccattattcgacctgctctgggtccttcggtagtatcctgttgtcggtcaccatagtctccaggactatgtcgatccagggaaacaagacctgcattgcagacgatatcatcagggaaggctaaggcgcatcggtataacgctgatacgacggactcaccctggccgcgcttagcagggctggatcgcatgagcgggagatacccagcgcaaacgcctgcttgacttgtccgacgtgagcaacatacctgttcttgaatgccaagtccgatcgacagtgaaagccggctttctccagcgatcggttgagatccacaagcaaagaatctctttgatcacctcgagttgtagcttcattaattatcgtcatagttagcctcgcccaagccgttttcccactggcacagtctgctgcttcgtatggcccatcccctccaacacgttttggaattctgcctcaccatgtcgacgattttggatcctcctaggctgctggttctcttgtccgccattatcggtcatgatcggtttatgcttgctgatcacctcgcaatcttcctcctcaatacagatggagttctcctttgacgtcccggcttgactcaacagcggtccagtcttggtctcctttcacacacttctcgtctggcttgactgctgaacaagtgtactcaatcgcacgacttgaaacactgccccgtcagccagaagaggttttgtagaatatgaggtaagtttgttggctcgaagggaatcgggttcccgttttgcaatgcagtcaaaatcgaccacaaccatcatggcatggaggcacagaccaaggaatacggtcagaggatctgcagagccccacacttgtttagcggagcagacggcgtggcggtgacactcaacagccaagagataatcacgatgttccgtagcggttacttagtggctattgtcatagccttacaaccgggaaagatcttcaccacgatcttgaccggtgccgtgttctcggctgtgggggctttggagatcggcaacgcagacatcggcaatggcgtgcagtgagcacgtcggaacatcagtacagtccaaagtgttgggatccccaagatctgcatcgcggtgatgcgatatggtcaagtggcacaaagcagcggtgtatgccagtaccagtatggtccgtccccacatatctcttcaaccgatgctattcttagtgatcaccgtcttcccaggacgatactccagcccccaggccggcagagagctctgactagcatctcagcggcggtgacgccgttttcgccacggtccttttgcaagtctctgacccttcccatcgtcatcgagggagctgacaacccgaagactcggtggaagtccacactcaaagcctcctcgtccgtcatcggcacaagcggggggggtgatctcgccgggaaggatatacgggcgctttgggatgaggtccggcttgatacgttgcttgataccgtccccgcggtagtagtacggaggaggggtgttctggtggcccggcacgtctgtatgtcctggctcaaagtgttcggatgcagtcgggatgaggctatatcaagggaaggacgaggttcaaaggaccactctcaaggtgattcggcttcgcttcccagtttatcgtggtttagtccggaacttctcagatgatcccgagctggttagatcacgcttaagagcgaccaaattgctcgttatagacgatggcccattgcatgtacatgcgcgattatgctgttctataaatcatacctccgctaaaccaacctctaaatatcggtcccgttgttcgacaaaaccttgccatcctgcacaaaaaaccactccgagtaccgctccgggatctcggcggcgggctccactttagacttgctaggtacgcccagcgcctttctctggtcgcaaccgttgacgaaactgtttccagccgaggtcaccgtggtttgattgtaattgatctcgttcgaatcgactttgccctcgacgagttccttccagtacccatgtccgcgttcgagaacgtccttgatgaattcgacgtcttggtaccattccccgacaatgggaatgagaccctcgtcgcctcgagcaagtttgtagtactaagggagggattaaaattcagcatcgacagcgagctggtcggggggagggcatcgctcacagtaaaccaatccctgtaggcttgaacgacgcccgggcggtacttctccacgtcctggtaagctgtaaaggcggatagctggtatcagtcgcgggttctctggcagtgactggtcgactcactgttgagaaggggagccagagggtcgttgacgtcgatcccgatcaacttccaatcggtctcatttccctgtgtagttcccgaataatgccgcgcagcggtcagacagagacgatttccgtatcagtctatcctatctcgtgtactcacgtcgtttaaagccagtccccccaagactttgacctgcttgatctgcccgacgaacccgggactagacccgccgattatcgattagtgcggttgcttctcgtccttggaacctggtcccccactcactcctgcccgatatcgaacaagtcgatcggatcgttatccccttcgaatccagtaaagggatgttcaaagttgggactctcccaggtttgcgggaccgagccgtagagaaaggggtaggagacatgcggccagacgttctcgacgaatcggggcgcgcctttacgggtatcatggaagatagggtctgatgacgatttccaacataggtcagatggtcagccgggtgaaagctatcgaggatgcggttcgaaagtatgattactgaaaggctcatcccgtgcgatctcgatcttgccgttcgtccacctaggaatctcgacgacaaagttgatgacctgcttgttcgactcgtccggatagagaggaacgtcgtgccagaatgaagcgggacatccatccttttccaaccagatcctccagtcctgatagatcggaacccgtaatgagaaactgtggtagtgaccggccagacagagcgtaacgcgtgacctacttcggtatttctcgccccgacctcgacataagtcaaacctgcctgtccgttccctgccttctcggcctttttgccgccctcgatatttttggactgttttccgccggtaggcacagcgagcgtcgtttgtacgaccaggagggaaaggaagagggtagcaagcgaccggcaaaccattgtgagcgataccgtttctcgatttatgcaggtgtgatgaggccaaccaggactctatcatactctaccatagctccagcgaacctttccccccgcacgctttatatgacgatgtccggacctgccagtctcgatcatggtaccactcaagccatcctcgttcacctaatcgcagccaagccgctcgggttgtaacctcattccgtcttatgccaagcccgtcttcatctcatcccggattcaccgacagcccgagactcttctgggaaattaaacaggaatcggccttttccacttggctcgggctcggtcatcgcgtcacgcacgttttatttcgagacaccgtgttccggctgaaacgtgcgcaaaacacgtaattcgcgcgtcgcatcgtcgacctgagtctggcatcgcggtgaatcgcggtcgatcttttcatggcaacgagacagtggtgagatgatgccggagtagccgtcaggcttagactgcgtgtcgctctttgaaggtgtgatcattcaaatggtcagaggttactggcatggttcgatcaatttttcggctgatcgatggatccgctgatcggttgcccgatcgcagctgaaaggtacacctggaacctgatttacgacgatatctcgcctggaacactttaccgcagaccattcttagaccttgccagcgatgataaccttggtatcgaactgttgcagctttcgcttgctgcctagctttgcatccttgttatcatataccagcgctttcgctcgctttgactcggatgacagcgccaacaagctgcccgtggtgaaacgacaatcgtcctcgttgacccatttggttcgagatatatcgaggcgagtatgtcggccgagatcgagccttgtcaaaccgaggacgaactggcatttctgtacactgggtttcgcaccgttcgcctggagtgattgacaacgcagtcttgcaaatgcagacaagtccgataacacttccgagtcatcagtcgctgacatagactctctgcatcgcattgccaggctcttcgatatcctccggtcgacctagtggatcagacaattttatcgcggcgaatgcttgtctgtcgtcagctttgtcttcagcgtgatcgttccgacttggacgagatctagctaatccattggaaaatcgcggatgcctcatggctaggtcactctgatattctccgaagcttgagatgctgttcttctcatctcggcgtcagtcttttgtttggtgccgcgacagggtgatgagggcattgagtggattttcatcaagggacaagtcgcggcgtccaaaggctatttggtcaacgattggcccgagctacgattttatgctcaaataagcgggcaattcactgatactggacgaggcgtgacgtccagtcttacgcaggagcgaccactttttcatccaccacagaacatgtcgcggtccgtaaaattatgtgaccacctaaatcgactggtcaaaggcatgtcaccggtggctcatccaacctgatcacttctagcttcgtctttaggacgatcactcgggctcgttgacatggtatcttcagatcggcacgccagagctgtggttatggtcaaacgtgacatcgtctgtcaccgttcgtaacaagcgggccgtcggcgttgaaatgtccgcaacccggttcccgtccacttgatgatttgcttccgacacctgcgtccacttgacttcggggcccggcaccttcggcatccgtcccttcaatttgcttccggtttgtgttcgcgcttgtcgaagcgagcagcgaggtagagatgatggaggtagataaccggtggacattcaaggtcgctcaacttgtgacaaccttgcctctcaagaatttcatctcgactttgacctgacgattcaagcgtctaacttgcataccgagcccgtcgaatccgatcatcatgccctcgctccgcgcacaactggctcactggctcgtctggtacaagttttacaacccccgacgtcaatccgagagcgagctgctggaagacatccgcacgtcgtacgcgcaacaagatgtcgcccttcctcctcccgaggacattgaaaagggcgggaagttcgaggtcgtcagggaagagaaacgattgcctgcagggcagacttggaagatcgatcacgtctccaagaaggacggggcaggatcagacaaggtgcttgtgtactggcatggaggtgcctttatccgcaaggtccgttcacgattcctcgacctcttggatctcaaactcaatttcaggtgactttcttttcaggccgtaccattccactggaagtttatcgcccatctggtcgaatcgaccggtgtgccgacgatcatccctcattacaccctggccccgatgtcgacttcgtcacacgccaccctcgccgcgctccagctcctgatcgacctcgactcggacccacgatatgccggcaaggagatcatcctcatgggagattccgctggaggctggttcgtcggccaattgttggccacgctgaccaagctggcgctaggggagaagatcgggttggtcggtgaggacgagattgagcgggtcgaggttgtcgaaaggattagggggaggatgaagaaggctatcctgatttctcccgcattggaaatggacatgggatcgaccgagcatccagaagatgaagagattcaggccgatgtatgtcgtggatccctctcactacctcgtccaaagttgatccgggctgacgagggcgcattttactcgacaggactcgtggctcaactacaagacctcgctcatcttcggtcgactctgggcacaaggtccagcgcatgccactccttccgtctcttacgactttcctagtacggccccggtgatatccagctccaaatataccatccctccctctgttagcctgatcgacgaacgcatgaatccgacccgggcgatcgatgtcctgcagcgttatgccgaaaagactggacatggcgggatcaagatcctgcagatgtgcgggacggcggatatcctgcataggcacgcgatccggatggacgccaagttgaagtctttcgggagcaaggtcgtccggccagaactgatcgtcgtgagtcatcgggtcggttcgtctgtgacgtagctgttccaacccggctgacggatcgtacttgcgtcgacgttcttgaactttgtaggaacctggtctcttccacgtataccccttgcttcaattcactccagaggctcagtttgcgatctcgaggatcaaggaattgatgctcgaggacgactgagggaggagccgatagatacgacgcgttcgaagatcgtatgttgtacaggtggccgtttactcgacactcgcattctacggtacaacaactttatagcgcttttcttctgcgcatccatagtccatgtcaaagtcttacattgtgatgaaaaccatatctcccgaagtccgtcgacgagatcttgcgcccaaaacgcctgtgcccaaatgcaaggcccgtccccctaaaagtcgtcccgctcacgtcgtcccaaagaaccacgtatcgactggcaaccgaccctgatcagcccccacatctagtccgactcgactcgacccgcccgacttacgatctggggactgttgattccccgcatgcgcattacacatatccaccgagccgacgagtgagaaccctctgccctctaattcggcgaggagcctgcaacacaggctcctcgcttgcaatacttcgacgccggtcgatgtgaaccaagggttacctcggagtttgatctcgagcgaattggggagcggttgagattctccctggatcccgggagcccacgactggagggggacgttacgacgatttccggtgggaattcgaggtttcgcgaacgaagagcagggtcgggttaacgggaagctggtatggctgggtccgacgtttcatgctcacgtagacagcgtttctgaaagcctgagtgacatcctctgaaggtgggtccacgatgcactaccacatcgaccgcgacatgagcccgaagaagaggtacgatcagccttgcccttctttgcatgcgatgcagctagttaacagtcgagagcgcatcgcacgacttaccagcctatccgatttcctgaaagagaccgagaagaactgcctattcctcggccctgtatgcttgaaaaagatcgtgtcctaaccccccgcgttcccgttcgagtttgagatgaagcggcctttccgtcaactcggctcgtctgtcgactaggtcgtgttgtacggaaggggacgactcaccttgtcgaacgatttcttgctcaagtcgcatgatcggtaaaggtgccacccgagatgagaaagggtggtcaagatggccgccatgagtcgatgggcgctggacacgggcgaggttccgggatggaggagcatattcggatcacgcaaggtcggtacggtgaaatggaatcgcagcagaatgacaagggtgggatgctgacatgatggcttccgatccctgttccgcccctgagataccaattgtccaaagggaataccgttcagtgtagaccaggaaggtggactcatccaaagacgtctgaacgtacacggtcttcctcccaacttgtactcgaaacatatcccctcgtacaccccctgcgtctgaatacctcgtggccagtacctcgagatggtctgctgtacggctggcaagatctgttctgggaatcccatgaacctcagtctgtccgtcttggatagaacgagacaggcgatgatgcagaagggtggaggtgggggaatgaccggttggccggtgtaaggggtgatgccctggtttgtcgggtgatattgcgtcgattgataattcatggtcgagggcggtctagaatattgaaggtagagccggttcgctgcctagatctaggcgattgcagacagttggcgatgaagatatgtgaaagagtaggttgattgaccttctcgcatgtgacccggcgagggagtcacctagcagttttggtcacgagacgatcgaccgaccatgtcgatgtcgttcggaacgggaaaagttcgtcgcctgtactccacagtcactcagctagtactggcagattgtaggtagagtatgatggagtggtgaaagagttacatgcaataatgtccatcatatcatcatcgccatcgtcgccgtcgtcatggtcatgttgcccgaggttgttcgctttcgcgtatagaaaagttgaacaaccgtgtcgtcaaatccggtttcgaccagaaagacacaagttcaactctctacctcgacatcttaagaacctgattacatgcattcataactcataaagtcatacaagaaacaaaagtacaagcggcacccaaactctagggcttgagacaatcacaaccgatcaattttacaatgacgctcctcccttcggcctttcactttcaatccagctctgcctctccgtcatcgtcctcgtcctcgactccgcctccagggacccacctgatcatctcagatactccacaagccagtgcagaattcgctctgtacagcttggtagccggagcgatccgggaaaagagaccagtaagttcccctctgaccgaggctgcaggaccgacaagctacatgatgtatctttttctgatttaatccggtcgataggtaaccatcgtggactttcaagctcgaggtagattgcactgggaatcggtaggcaagaaaatcgtcagtgcttgttctccttttcctgcttccccctcctggtcgactatggcttacatgcgcatttccgtccggacagggaaccccgttaccacccaaaacgtcctcgtcgctcgaatacctcgccccagactcgctctttgaccgggagacggatgaacctactctagctggactatgggatgagcttgttactattcccaccgcttcccagtcgatcagctcggggacgaacaccgatgcacgaggacgacaggggacggacgaaccgcaagctcaaggggggacgatcttgctcgtcgggttctcggaattagtctggcaagggttcgagccggatttactatccaggttcacacgggcactcatgggacattgtcgacaggcgagtctcaccaaaatcacctggacttctttccgccccgctgatatcgatcttgcgaaccctgatcttcctacgctcctgcgaatgcggcgtgaacagacgggcaaatcgctgataacccatcttcacgcacacctcctgctctctccatcttcactggcagaccacctcgccgtgtctccctcgacggacccagagctggacttgctcttgcgtctcctcaaggctgggcaggacggtggggtgtggtggcggatcgaagaacttcggagtggacgtagcggggtcgttcatggcgaggtgagtctcacatgccctcttttaccacactgggggttatcactgccaatgactcgaccgtgctgaccatggcttttgatcgtgctcaaatcggacggcagatatctgttcatcccctttccggtcgttcggcgggtatgcaaaagagggtaccgtatacctcgccgttgcagtacaggctggacgataatgtcgtcagagtgttccccaagggaaccgggagaggttacttataagcgggaacccgggtgaaacgacaagacaggcgaaagccgaatgggtgcgggacatggtacagcagcctcacccttcgacccgatatcggtgaatgagcaacgtgaataccttcaagctggtctatctgtatccaccgcaagcagaattacaacattcattagacatgaaccttgatgatgtcttgagaccgaaacccagcgattgccgacttgcaaacaggccgaagccgctcaggactgctgacgaacgtaagaaagcaagagctttgttcggcgaacccttgtgcctttcacggatccactcgcagaaaacttggtcagcgcggggctacgaccattctgcagatgccaagctgtcgcacggggttgttataagccgactcggttcatgtcgtacaagggaaagatgatgcgaccgaaaattgagtgcagcagcaaatcaggctggtgtaggttatttgttctatatacaattaatatgtcttgaaaccatgtaaagcggcttggtgtagtggaagcacgctgggctcatattacctgttgatggaacccagcggtcctcggatcgagaccgagagccgctacttcttttttcacccgtctcttacggtctttttgcgtcgacttgttgtctagcatcgaccatgtcattaagtacatcttcattcctcgtgccgatccagcggccacagtgtttctctagctgtcaagtatgtcacacgacttcaagccatggggcgtccgacgttctcgacaaagctaccggtagcaccaggctgatgcaagaaggcaacggttcactttcacgtcagcggtggtcactcgcgtcacaagcaggaggtcctcaccttgagcttgtactcgcaaaccatcaaggtccagatggtctattgccgcaacgatcaacaacgtcagatacttgaagccgacgagattctcaggcgagtttggatatacctttttatcctcggcggtactcgcagggcaatcgacggcggcacaaccgatctcgccgagacctttccataccatctctgcaagacgatcaattcaataccgtcagcatttatgttgccggcggaaggatggcgagtcgagacttgcgagtccaatgagctgcaaaaccaagattgttcgaatcagcataagacgccggagtcccgagtttagactcgacctacctcccacgggattgtcatagtcgtaatccgcggcctcgccgatccatagcccggtcgccgtcctaacgggatccgtatcagcagcgatggacgccgcaatgttctccccgtagattccttgactaaagtgtgcccggggcaaatcgtgtcagtcattggcctgccggtcgaccaccgggggcttacgaatgggcccaggtacactgtgctccccaggcttgggcgacagaggccatctcggtgttccatacgatcggtttagcacctataggagggatacctatcagtcagagaagaagccgggtttggactttggaaagacatcggtacgcaccgtacttggctcgctcgtcgttatgggctttgagccagtcttcgggcttggaacgatcaggtccacctacaccggcagaagctgcttcagtcgtttcgggagcgctgagcgaggtagagactgtagcggtggacgattggctggccggttgcatcgacgaggtaggttggtcgttgagctcctgttcggtggaagaagcgacttcttctttagtggtggatgtagtggtcccgacgggagccttgatctcggtggccatcgagatctgagcggacttggcgacggtctgggtcgccgaagtggtcgtcttgacgggatcctccaggtcggtcgtcgaggtaggctgggagacctcggtatcgggggtttgcccagccgaggtgctcgtgctcgataccggacgcctcgacctgcgggacttgcggtgacaagccgttggtttcgtttttccgctaccggtcggagaggcaaggtccgtcgggacggccatcatcatgccagtcttttgatcaccagagttcacgaccccgccgtcgaaatgttgtccctacgcgatcaaacgggtcagccaaagccgctacggtagccgtcgaccgtactgacgcattgacccatgcattggtcgtaagcacggacgacgttcatcgtgttgccgagactactgggcctaccggctctcctcatgctgagtcccgctttcgccgacacgctttcagtgccgatgaccagcaaaggcaggagacgcaagaggttgctgatgtgcataatgggcgaaggaacggaaggggttgggaggtgataatgattgaaaagaagctgccgattaccagaatcggtgaggtcaatagatggtcaggtcaatccgatcactggcgaatcttgtttattgcttgtgccctacgaagcgtgatttctttatatgttgcctgccaaggcctaaatcactggtgttttgttgagatgaacgatccaaagtgtgtgtgtatatgcctttgatgttgattcgatcaggtgccgaccgaccactggtgccgactggtaccgactagtagtgccgggacctgaaacagcgtcgaatcgatgtaaacaccccgttttgcgtgttgcatgttacaaatgaaacgcgtttcggtcgttggttcggtcgtgatcacggttaagcaatcatcatcatcgcgtctagatccgagacatgcctttgttggcgatgaagcatcagtcacaaaatgcaaccctgcaattccaaggcatagatgaaacgcatgtacgagttgacagctcagcggaaaacggtgatcacctacgactacacaatcttttcattccgccagatcatcgagcgatgggtgacgtgcagtatgagcaggatcacgaaagtcgggcgtggaaaagactcgtctgacatgtctcctcgcaacttgtcgtgacctggggcgtcaatcccggctcgggaagttgtgtaacaaaacgacgttcaatgaaagcatgcgagtaaagtacggcgtgtgtacagatgccttgactttcgaagccacatacaacacggaaagttcctgattactgactatgcgaacgatgcgggaatggatactatgctcgtgacggggttcatgctggcgtaagaagaaacgtgtcgtatcaagaatgggcatgtctgcgatatgcgttgtcgtgtatggcttgtggcatctcctgcttttcaagcaaggggtgacttgatggaatcggcccggtggacccggatggtgggacacatgtcgtcgtgatcttcttcgtctccggctagaatggcggcatcatcgccaacggcaagtcgaggactgaggacgagatcgtccgcgattgtgcccaagctgaccgagcttcccagtgaagcgatcgaattggtgaccgagggtgcgctagtgtaggatgatgcccgagacatgcccggtgtgaccagggtcgagccattctccgtacccaggacaaaggatctgtgggcggggcgaacggtcgacgcagtcttgggaggcgaggcgacctctgtgcccgattcgtcgggtacgtcttgttcgccctgcggtcgagcacgatctgccgacagatcgagacgcagatcgcccttgcgttcacggaaagcgcccgagtcgagtggcggcttcgtaggtcgacctcgtttgctcctgactggacgaggttttgcacctcggcctgctcttgcatgagcgagcacctcggccttgagcctgacgagcgccctgacttggtccatgtcgagcaggatgttttcctcctcgttctccgtgtcccacagtcgggtcaatttgggcacctcgcggtcttcttcttcgacgaccaccttgtcctcgagaaagacgacgtcgcggagccattcaaaggcgtcggccgggacatcgtcatcgagtcgtagaccgacgcgacgtcgtgtgagtgtgtcatgggcgttacggagtttagcaacgacggtggggtcgaccgactgaagcaccaggagtgaacaagcggggcgaagttcggacgaggtggtgtacgacgccttgccgacctcgatccaacgggtggtgatggatttgaagaggtgtttgaggatggtgagcgtcgtggtttcggtgtaagaacctgccatggtccgaatcagctttgcggcggtgacgttcaggtcgaaaggtccgactcacccttgaaactccagacgagagtctcgacgccattgtcaccgatccacgtcttgaaagcgaacgagtagtcgggtttgaccaaccccaagctctcgtcgggctgtggcacagggaatccacctggaagacaaagcgtcaacgacgtcagcactcgacagcggtgccgaacccttgagtgaacggctcaccttgcaccttgagacacctcagcccacccaaccattgaagcgggctgatcgccgtttgactgagtgacccggcatcctgcctgtgcttctcactgacgtcgctgtagaaccgatgacctgattgacggggactcgtgttcgactctgccgaaccccggcgtgatggttcggccccggtcgtcgggaaagacgcgccactgaaggggtgttcatcctcgacgtcgttgaatctggcgtcctggcggaacacgtcgtccccctcgggcttcctgttccaattggtattccacctcttgcccgcctcgatgaggtcttgggggacgaggcacgtcggaaaggtcacggtcgttccggcatgctgctgaccgcgggtggtaaacaagggtgtaaacggagcgggtgagaacgagctcgacgtgttaccgcccatgggatcgtcgttcgagggtaacctgagccacggagcgtcaaggtcagctgttctgccctggtgcgtgctgacgaggtggacgacctgactcaccattcgacggctagtaatccttggagtacttgcacgatactcttgacctcggcggctctcgagggggacatggtctcggcgtactcggaccccaagaaggtcaatttgtggactttgggcaagcatgccgggttgatcgacttcgaggcggacgaggatgaggccgatgtaatggattcactcgaggtactcctcgcatgcgtgtgggtggcgaggagcgaattcgtcctatgtgtcatccctcccagcgccggcctcgtcgtcgtcgtcgtcgtcgtcatcgtcgaggtcgaggtcttgccctgacccagcacttcggcctcttgcctgtactcttcctgaccgacgacgaaccggagatcgacgaccaaccactcgacgtcgtccccgatcgtcgcgagtctttcgtcgggcaggaacccgtgtacagcctctcccccgcgatcacgtctcatcaggccgagcgtcgggtgaaaggcttcttcccatgcggccgtggtggtcaagaggagcgtgccctcttcgaccaagatgttggtaccgaacatgcgggactcttgatccccgttctgctcgttctgatcgacctcgacctcgtcgagcccgacctcgacctctcgacctcctttccatttgctgaccccccacactttggtactcggaggtacgatccccgtcatccccaagcccaaccctctccccgacttactccccgctgcgaccctgctctttcttctaaaactcctactcctcacgcgtttcacccccggtgccccgatcgaccccggttcatgttcatcgacatcgacctcgtcatccgagaacgctggggtgcaagacccacccgtcgtcccgtctctcgatgatcccgctctgggttcactgaacgccggggaataggggaccgagggtggtggggagcgtaatgggccatgtaagcgtggttgggtgtgggtttgggatgagggttcggcgggggtatgagcggcggtcgttgtcgtcgtcgaggtcgagatcgatccgagaggaatatcgaaatacgaggtgaggcacgggggtaacctgccgacgaccatcttgagggcttggatgatgtcgtgctcgtgctcgtgaagcgcggaaaagatcctgagtttcgaggtcctacgaggaaatgcgattaacaacaaaatgggacgttcaaatggcgactcgggagactgactcgatcgagtgtatgatagacccggccgtgttatcccaaactgtggcggatgagaccttcctttgaaccgagttccctttgtatgaggacaggtgtacctcggttgttaaagacaagggccggtactatgttcccgaatagacgtgacttgaagacccttaatggaggtgccagggagtgaaggttgctatcgtttttagatcgagaaccgtggtcgagccgttgcctggtgatgcgtgtctcgacggtcgtcgtagtaagtgctgtatatatacttttctacctactgtatcgcctagtgtgaccaggtacgactcgccgttaccgccggcaagggcgaaaaaggacctcgaacgaggttcctccacccggacgcccctgagaatcttctgaatggcgagtgggcgagagggtacgaggtggatccgaccgtgatctttgatccgttgaaagtcctccgagtagtagcgagtatgaagacacaaaaaaaaagactacgctagtaccttggcgtgagcgtgagcgtgaaaatgtgggtaccgagtatgtcggacgagatccggggtgggtagctctttggggtggatctctcccgggaggtcaggcggcggatgatgtcaggagggattacgccgaagactatcgtcggggtggagggagacgacgagtggatgggggttttgtttcccggtgatgctagataggggactcgtgatgacgtatcgaggatgtagggcatggtaggtgagattgagagaacaagtgtcaaggtcaaggtctatcggtcgagtgagtgtggtcgagtgaggatctgcaaccgagctgacccacgagcgagacacaagtcaggtgaccccgagttgaaccgccggcaatggaaggtcgtctcaaacaccgactcccccgacacactccgtaccccgttcaaccccagactcgagcaccacagagttatttctctcgacaagtcaaagacactctcggacgagtcggatgagttgcgagttgcgagttgcgagtcgatgactgaaatctcgacgacatgatgatcctcgctactgcgcgggggaggggaagggtcaagcgactgccgcagccgcggcggtgttgggcgtggatggggtcgagttggggggcaagaggtcgttcgaggtggattgcgagaaatccgtctggtgtgtgatgggcggtgtcagacggggaaacacgcctgacctgttgtgccaaagacgggcgaggaggagatgaatagcgcaagggaaggggatgagcttcctggggatgtgcggcgacgaggaggatgctctggtcgaatcttgcctggtcactcacgtccgtttccccaacctggtcgccaacctctcttccaacaaggtccctcccacctgcaggtcctcctcttgcccgccatcctcgtcgtcatcatcatcaccgtcatcatactcatctccctgctgttggagctgccgctgctgatgctcatcctcgtccgacgtactactctcactctccatccctctaccccatacgttccatcttccaggggatgtatcataccctgccgcgctcagatccgcctgagtactcatccccgtctctccacgtttgagaactgggcgtgtggacaaagaagaggtctcccggccgtggtcccggtcccggtcccggtcgttggcttgtgattgtgtttgtgattgtccaggtggagctcggctggagaaacttcttcgtttatccctcgtccctccaggttgatgatgatggtggtggtggtgatgatgatgatgatgactcggggtggtggaccgtgagatgggtgccgggtccggtgaagacggtggagatctcgaacgaggtctataattcctactgaccgcgttccctgtccctcgaactcggactcgaactcgatcccgaccgacacctgcacctgctgcttctttcgaggtggacattccttgacctccagcgtcggccgtgcgattcttgtgattaccggcggaagaggctgtcgaggatgtgcctcttgatctgaagaacgggtgatgtggatgagtaggtgccgcggggagcatgtcgaggttcatcgcggtcgtgatcgcggtcgtggtcgtcttgatggcaggttcgccgggatgttgcatgatggcgcatagcaagacgtcaagctccgagtcctgtacaaggttattggtttggtagatacaacgatgacatgacgatggatgatagttgaacagacgaggatctacccatgaaattagactattattctactaaagcgagctcacaagacgacgacgaggaagaggatgacgacgacctacgacctgactaatcgagattagagcctgtgtatgtcatgtcgcatgtcgtgtcccgcaggaaataaccatccaggtcaccgatgccacccaccgacgtcgtcgtctttcacctctcggcttcggctccggctccgttcccgggggaaacgtcagcaaacatcatgtaagcacgagatcagtatggggatcatgtcaacaacgacgtcgacgacgacgacgacgacacccgacctacaaccctagaacctctatgagagcgagtcgttattgcaagagtagagcttggtagagtggacgtttctgcaagtcgcaagtcgaatcgaaaagacgtcgtcgatgactgtatggtgacctggtggttaaatttaggttcatgtcagctgcgacttgcgcgccacgcgataacccaagtaacaacatgcaatagccagctagccaaggatatatagtcaaggctgttgcctgcactatcactactgcctgctactgcgtagaacagggctctctatttggcgcgactgtgccggtacaaaggccggagatgggaaatggacacgttcactgagctggtgctacctacgacctaccacctactctgcttccgaaacttgcccggctgccggcctactccgacccagatatcatgtcatcagagtagtccgatcagtttcaaaggtctgtaccttcatggcctctcctatattcagccagggcgaagagcatgtacgaaacttctacttcgctgtcagtcaaacccaggggacgagaggctagaacatcggatagcagattcggagatttaggtccacagcaagtcggccacctgtaacaacgggggcgcggtattgccagaccatgtttgtgtaaaccgatcgttcgtccttgttcgccgatcgtgacgacgacatagcgtctgaatttcaccgtataattataaattcattcagttcggaagcgaggaatgagaggttatcgacgtatcgaccttccgacgatcgatcctcccggggaataatcaaaatgttgttgtcgttgttgttgacgaggaggaggataccaacgagtctgatttgaagcgagctcgaacgtgcaatctcaagcaagcacgatcagtcaatctcaagcaaacgcaatcggttctcgctcctgcatagtcgatcgctcctgcaaaggggacgtcaacaaacccgatcgatccgatctagtgagccatcaaatcatcgtttgccgtagcaccagttctgatcgggagactgccattttgacaggtagagacagatcgaaccagagagaaggacgttgtttgtgagttgtttccgtatctaccaccctggcgctcgacccgtcgccgatcacgacgtcgaaacagatgaggccgttcctgacgatattattatgttttgtcgtcatttattgcctgaatccaaagcggctgaggagaggatcgtcgtcaaagaaccaacttcacaagtcggttttgtcagagacaatagaatgactatcggagaagacggtcaagggatgatcatacggccgacgatcgtttcgttgcttctcgggaggacgctcgagaagcgtagaattgagtagtgatagggtcggacgataaaatcgacctgtacaagtagtctcccttgtaaatattcaccccacgtcgtgcatagacgtccaggactatcggttatcaacctatcccctctatcgacccgtttctgtcctcaagcgttccatactcggccgaccgaccatcgatcctaggaatcgacatcggaacgagaccgagcagcgtgccaatcatgccgaccaagctgctcgaaaagctgaggcgtaggcaaagtcgagtcgttgtgcgaaagccacgaggaccgggcggccaacctgaacgacgtggtacggccgaggacagcaagacgaacgacgtcgagaagagtagtagtagtagaaaggccatcccggtcgtccccgtcgtcactggaccatcttcacctgcactagagacccccttgtccatcaccagcactcgatcccggtgccaacctatgcgccgacccgtctcatctgctccccgtcgacctttgcctagatctccctcgctcactccgctcccaccctcacctgcgcacgaggtcgagattgaggcgctcgatatggaggtccaggcgacgatcgctcgttgtaaaaaggaggagatcgaggtcgacatcttgttagccgggtaacttcgaattgtcaaccacaggtcgggggcgcaggacgatgcggagaagatcagggtgagtatgctcgggaaggaagagcagatcgaggcggaggaggaccaccattggtacgcggacgagtgagtgtctcctcgcttctaccccggagccgacgccgacgccaacctgacttgcggcttggactcgaactcgaacctggactcgtcgctgcagcccggaatcctggcccacctcgccctgtacggctccccccgactacctatccatccgaatccgagacgttgagatgccgctcgaccctgttcctccttaccccgagtgcgggtggtacggtgggtccatgtctagctcgacggggacgacggcggcgatgacaaggataggccgcgatgggtcgttcgtggacgtgcacatgggatcacggtcggggtcgtcggacaagtacgatcgggcggttcgatgttggttccccggccatgtctacgagcgagacgacgtggatcgactctctcggaatgacgcctagtcatccttccgctcccccaagacacaacaactatgcagggggtatgcgaccaaatgtcggtggtcgacgtttcttgggaggacgatgggttgccagtcgaggtgctgtggggtgacgccatgtgacgcgaacaagacgtatcaaaggaggacaataattacagtgtagtactgatacaatacagggtcgggtcgtggcgagaacgccggtctggatgatgtgattcgcttggtcaggcggaatatggcgtggacaagctcgtgctggtggtttcagtttgcgacgaggcggggtatatatgtgtgtgatggtcgaacgatgagttgtcgtgggtgtaacacggaagaataagagaatttggaacatgaaacgagcattgaaacaggtcgagacatacgtccactctcccagcccgactagcccctagccactactagccaccttcagcacacctccatcatcctcgtcgaccaagaacccatgtccgacgttgtctcattcaagagcatgcccaagacgggtcaactccctatcgtgagccattattcattcctcggggcccggcgtccgtttcccccgtgcgcctcggtgtgtgaactgactcgactcgactcgactcgactcgattcgacttggcaacttccgcagccgacttggacttgcccgagcgatatcaagctggacgacaagacgtgctcacgccgtcacctaccgaggctcgatcccatgtgcaggggcaggatgtgaacggggaaggacaaggtcgagatagaatagctgctgtcgtcgtcgtggtcgaaccgatctcgcctgagccggtttcgcgcgggcaactcgagcgaaaccgattcgaaagagaggtcgtggtagacacaaggactatcgctcgaccgatcacgacaacgacacacagtagtagtagtaacgaggtcagcgagcagagtagtaaagtagcttgaactggctggtgtgttgtttgacgtggggttgtgttgtatagattcgacttgacttgcttgcctatatcatcgttccaccacttgcacacttggctcgtctcggttcctcgcttgctaatctctttccacctcgatcgatagctcacttgaacctcgacgaccttttgaacagagcaacaacgtatcgtaccaccaccaccaccaccaccaccacgccgctttggtctgcaagctcgtcaatccgtaatgcagtagtgacatcttgcatcttgacgccatgtccagccaaatcgacaccaccaccacccgctaatcccgtgcccccgatcgaccccaacccaagtcttcgtcgtcgtcgtcgtcgtcgtcgtcgtcgccgtcgactgcgcacatcggacgacgggtcatgtcacacccgtcaaacccagcccgaccgtctcgacgacgtcgcaaagcatcacacgatcaattcgtcacctcgtcgaccggaccagatgccgcagcactactggtaccccggacgagttcgacgacgaggagagagtctaggtttgctaaaacatggttgatcgaggggttcaaagcgttcggtcgacatatagctaggaaccaggtcagtcctcgtcccccctggctgtccttctgatgtacgctctcagctgaatcggtacttcgtcggtcctcctcggtcggtgggaacgaacagatccgggtactcttgatcgatagtttcgtcatgacgaccctgttctaccctgccctcgcattgcaattacaacgttcctctcgatcccggtccacgaccaccgcctccccgtccgacccttcctctatcgctggggacctcacctcgaccccacggcgacggtcatcgacgcatgaagacccgctttccctcttgtccaccccgctactggacagtttcttcccttacccggaccccccgttcgagtttggtgctcctcccaaattcttctgggaatctgattggaagggatggggaggggaagaccaccccgatggtgggcagccggacgggaacgagaacgggaattcgacgtggatcatcgaggaaacggatatcgggtcgggaaccggtcgtacccgacgtccagggatgcaacccgtcggatcaccgagctggacgtcctcgcctggatcgacatccgcccgctcgacgatcatcgccgctcctctcgtatggaccgacgtcgagaccgtgctcgagacttcacgggtattcgggggtaccccgatcgacccgctcgaccgggcggcgtcccgtcgtcctcgcgcagtcgatctgcgtctaagacgggtgctcgacgtactagcgaacagaccggggatcagtaggatcacctgtttcgaggccgtctccggttcgagcgtcgtcagccaggattgcctgtccagcggaaacgagggcggcctgcaagggtcttcaggagtagcctacctctcgatcgaacgggaagatggctccatcctgtctgtgcgatcgatcgaagaggcgtggttagaggtcaacagggaggtctctgggccagagatcggagtagcgctcgattggatcaggctagggcaggtagaggggagaggtcggtctgtgtccatcagagtgagttccgagtttaccaagagatgcctcccatccgacgtcatgcaagtcgctcatatgcaccgtctctcacgcagccccggccgatcacctcgaaccctgcatccaccccggctccagcgggtcattatcagacccccaaggagatcccttcgcccatcatcgtcctctacgtcgtcctcttgacctacctcctcgtcctcctctcccgagccaccaacgtccactctcgattcggtctcgcctttaccggcgtggtcgaactcgcgtgctcgtccatcatgtcgttcagcgtcatggccttgctcggattcggggacgggaaaaagggattcaaagaaggcgaggcgatcgtgccttactacatcctgccctttgtcatcctcatcgtcggagtggaaaacatgtcggcgatcgtcaaggccgtgtacagcgtgccagtctcgtattccgtcccggacagggtcggactcgggctcgccaaggtcggacccagcttgctcttcacgtcattgtccgacattgccatcctcgccgtcatcgggttcttcattaagctcggtccggtcagggacttttgcttgttcgccagcatcctcatcgtcgtccacttctggatgctgatcacgttcttcctgacggtcttgtcgatcgactgtcagcggttggagctggacgacctgctcaggcaggtctccgagatacccatccgcaaggatctcatgggggacaaccgtccatcgtcaaagcgaggatccaagggggggaccgacatgaacggtcggaccaggagcgggagtttgacgaccgactttgccaattcgacctggatcgcgggcgcgagaaaggcttggaaggcgagatcagcgaggggcgggagcttgatcttgctactgaccttgctcaccgggttgtattatgccaacgaatctcgagacgctcgacaaactctcgccatactcggtcgacggggtgaaggtccggaccatgccgtgcctacacgactcgcttcgctcaacggatccgcatcttcgtctcggatctggaacaccatcaggcctgacctcggtgaacacgccatcattcatatcctgcccatcactcgaatcgtcctaccctccgccggacacgccatcacaccacaagacctcgtcgattcactgcctttgatatctcgaccagtcttgcctcggctcaaaccgatattctactttttcaagatcatcctcctgccacagtgcttgaccgcctttatcgtctggttgattctgctctacttgctcaaggacgccgaattgctagacgctcagcgtaacaagaaatacgccggagaggtcgtcgatgagctcagctcggaagaggatcaccaagtcgtcaagccagaaatcaatcggtccgtacgcttcgcacgacagatgagctcacgcatcgctctatcttgcgaagccgatattcgtcaagtggtggtcgccaaaaatcgaaacatcggcctagcggttttcattacgggtcaagtctttttgtttcgaccgctcgacgatgcaaaggtcaaggacccattacgtgccgtcttggtcccggcaggggtcgctcttgccgccatcactgatgatggcgcgtatgcctgtgtcatcggtcgttccggccgtctgaggtttatcgatatcacgacaccagagaagcctcgccccgtacgagacggcgctctccccaacggcgtcaccttgtcgccgctcgatatgcgaatagcccggatcggtggtgagaacacgatcgagtggtctaccactagcggagtcgaagtatcagccaccgtgatcttttccgatggatcagtctggcttttcagctcgagcatgcagtcgaccccgatcaagatcgtcgaggctgtcggaccggtcgccagagcgcaattcttgccgggaggcaatcatggccttgctcgcatcgccattagcaccggaaccgagacccagatctggcaggcaggaggactagacgcacgagattcgtggatcgagatcttcaagcacaatcatgccttgtccggcctgacgatcacagcgctcgccacattcagcgtaatggacacggaccacctggctgtcgggaacatcaaaggcttcgtatcaatttggtcgctacagacgctgtcgtgtctctggagtgggccgatgttttctggaagtagcgagacggcgatcgaccgcctggagtgtgtcgtgccgccctccgaagcatgcgcacagtgcaatagagccaaatcccagacctgcatctttatcggttctaatgccacctccgtggcagacatagaataccaagtcaaacaggacagccatgatgcctgttcgtgcttgagttctacgagaaatacccccggtatacgtcccgtcgacagccttctatcgatacccatcaaacgcaccccacgcagggcctccagaacctatcaagcgtcctcgccggtcgccattccaggtcgtcgctctccctcccccagtccttctcagactcgtttgtacgcaaatcaggcatacaccgactcgccgccaaaatcagaggtaaccaaccttgattccgacctggaggaaatggaacgcgcttcacacgaatcgctcgatcgtcttgcagcggattcgagtttgcgatggatcaagactcgatcgaacgagtgggccatgcatcggggaagctttgccttgcttgaagaccatggcatgcttgttatcactcgcaagcaagcagccaacgcgaacgagagtctcgacgctcaatggcagactgtcgtagtggatttattcgccagagaccgccgtgacgaggcgcttctcccattcacattgagcgtgtcgcccccgaataaatctgtgatggccgaaacgaaagaggcgacccgtatgtcactgagcgcgatcagagcttcgcgattagaatccctcaacaagatcgcttcttcccgcggacatccaggcactagtcacccattgctagcgttctcccgagccgactctgtgaagctctcacgaagcgatatatctcttgttgtgactggtaacattatccattcgcgtcaagtaccgacaacgccaccgtctcctccaaccacaatcatcgaggaaccccctcgcaaaatgtcagcattccacaccgcgcctctggcagcgcctactctggtcacgccacgtcgttgatcaggcgaggcgcggtttacagtattgaaactcgcatagatgatcatccactacaagttgtatatcgaacctataaattatgcattgcactgtcatcacacgcaagtagtcgactctaccggcccgcccttagacgagggcccttcggagaaatccccagctgcgtcacaatatcgcgccgtctttgctgcaaggctggacatttacaaatccatctcacgtcagaactgctgatccctctagctttgacgagtgattcgcgctagtatttcctatcacgttccgaggagaccgcaggctggaaaattctacagattgcgaatccgtgagatgggagcgcaggtgtaccggctcgcagtctagctatgcaagagaccatatcgggacaagaggaagccaaagggcgcaggtcaagcggatagtctaggaattcttatacaggttctccgggattggctactcttggtacggtaacccccaaaggcaacggggacttgcacacggagggcatgggtgcgacccttgcgtcaacatgggtggggagagggtattgagtcgatgtaggtacacattgctcttacaacacgatccttgccgatacgaccgacatcttgcaccaacaccgttaaaggcgactctctgcgtttcgaccagactgtcgaattggctgggaagtacatctatctgatctaattacaagatgatcgtcacatgtcgtgaattccatgtctacaagttctcgtcttttccgattcgcaaaacgcaacagtgaattacatgggtcattccgaactcgttgatggattcggttgaaggattcgagcagtcgtgtgtttgcccgcgagcgccctctatcgggatgcgatgacggggctcgtcgtgattgcctgcaggtggtgggggacgtgtcgggaatgtgcaaggcaaaggcgatggtgacggcgggatgcttggtgtcaaggtaggtggtaggaattttgcggtgtgacgcgtgtatggttgcgaggaacgatcctattgagcgcgattcctgctcttgcatcgccgcgcctgagcttaggcttcccttgccaattcgctttgcgtcaaccccaagtcgaaactcatcttccaccctttggtcggaacaatgactttttgcctgccctgctgcgaggcgctcttgcccgcggctccagcgccgaccattccggcgtggggggtcgagtacctcccgcccgtgccgacgaccgcgttgggtcccgagctggcattgctcgaggacaaggtcaaggtgaggggtcgtaggggcgccgaacgggggaaagaaggtttcggtcgaatgaaactggtcgatttcgagtttgtcatagggcccgggttgtaattgatcgttctctgattaccgatcgaggccgggctggggtaagtagcccgcgagacaggcgcgtttactttgctcctgggtttttccgacaaggtgatcttggacacgggctccttcatgacgacgtctcccgtctcgaccgcgttctgcgcctgcatgaacgggctgctaaagtccaagcctccaccgccgagggcgtcctcgacttcgctgccggaatccctcctcttgggcttgctcacttcccttgcgcgtagcgaaaaaggctttgtcagaggagcgagtttcgctggttccttttcggcaaggttgaagcccaactcttggcgctcgtcgacgctctcgcaaaagctgctcgtcatgccttcgtcctcgtcatcgccatcggcatccccttctctctcttcgcggcgcccagctggatgttgttcccgctcgaggtcgtccgagcaaaaggaattgttcctaagcgggctgggtcgacgacaggatcggggcggagtggtcatgggtgtggtcgaggtcgatttcgtaacggtggtggtcttctgaaggttcggagccaatctcgaggtcgatgcttcaggtcgagaggtatcgaggaggtgagaagatgtcgggaagagagggtgatgtgactgggtagacgtcatggtcataccgggagaaggggttacttgaaagtgatgtcccgagtataggtcgcgcgtgatagagttcaagtgcgtagtggtgatcgttcccagattcgagtcgtcgctagatccagcagagtctttcgcagtatctaccagatacacgccgtgcagaactgtataaggtgatagacagcatctagatcagtcaaaagatttcttcaaacgatgacacgatagcacgcgagaccggtcgtgctacctgctctctctcagtgtgaaaggaacggatagcaggggagactgggatggggtgatcccgaagacggcttgcatctacatacagggagcaggtcttgtggaagagagcagactgtactcacaagataggctgcagatgggcacgagaagatgtcgtctgcgaaagtagacgcgtcaaagaaggatgtacgtgggtagaatcaagcggacgtcgacagattcccgtctggcaataagcgagtcaaggtgatgatacggtgtgggtgtatatggccgtgatataagctctccaggaatcggtggtgtgagtcgtggtgtgtgtgcagtagagtgtgtgtgtgtgtgtgtgtagtgtgatatggtctggacgagtgagtgagatgatgtcgtttccccaacttgagctgccccacagaatccccaaagagttcgacttcggatgtaaaattaacttccgatcattatttacttccgtaatcatccctggtcgcgcccctcacctaggatcggaagtattctattacgtcaacgccccccggttttcgtggggaaacccccccgggtgggtcgcggacgtcaccggtggctcgtggtgtcacgcgatccacttctccgtgttcttgagggaacgcgtcgatgtttcagcacaaaggtcaaggtcatccccatcccaaccatcatcatagcgtgtgaggtcgttgagcggcttagccaagtagccggtgagttctcacgtgagtccaagtcatgtagatcttactgagatgcgtgccagtgtcatcatccacccaagccagtctcacctacgcttgcgacggaaacgaactgatgtggcgcgtatgagggcacgatcgcccttgttctttgggacaatcatgaaatgcaaaagatccccactatttcgtccgatatcttaatgaagagggagtgagctcaatgcgctttagaggcggtcaccggccatctttcaaatccctcttttgcgccagacgcgtcagagccgatcttgacgctatcgtcccgacctcttgacgaatcccggtggaaaagcccgtaataacagctgacatacgactatcaaaactgtcctaatcgtacgcaagacgagcgtgtattgtcgcatcagcagcctaggttgcgcacgatcaggtgcttagcgttcgggtacgtgatcatatcttctcaggcgaccggcataccactccattgtcatcatcccctggcgagggacattgcgtcatggccgacctcgactgctcggaccaggccgactggttgagccacatgacttgcgatccttcctagctcttccccaccggcccccacagttcactcccgtattcatacccttgcttacccctcgctctgaaaggagtgtcacgtcgcccctttacccccgcttctccaggggtcaaatcagaagggaattcacacccatcccctgagtcgctaggagggcgaaggtatggatcggcagggcataaatactggtgcgagattgagatgatctacaacgatctcttgcagatcttcgacattaaccgacacaaaccactcgaacacacaagtctatcagtcttttactttccatacttgctgggcatagtactgctgagcaactaaacaaggacaacgaacagactctcacacgaagcgcacttcacaacccccgatcatgtctctcatcgcgccttacgttcccgggatgggctacgccgacctcgcctactctggcgccatggcggcctcgagtgagtttgattcggacgagaaaacgtttgcttttccggatccaattgacacccctcgcatcggcccatagtgtaccacccttactcgatggccaggtatggatcgtactctcgaccctggtacaacagctggtatggcagttatggtgcttaccccggctggggctacagcggataccgttggccggtcgcatattgaggcgtgaggtcaagcagctgtactttaccgtgtaatatcagcatgtaagagttcttgacgagcaatgagtgtgatcccttgactagcggtccctgcctggcctgtttttcgttgttttggtatgccatgcaatttgacatgtagcttgcgtaaatcgttacgactggagccgatattatattacaactactctatgcgaaagaacaggcgaacgacattgcaaagccgacgcgcggtgtagtaccgaagaaacccagacgcaaagatggccggggatagacaaagcagagaaagggactgaccaggcggattgcgactaaagtagacgcgattccaactcgactaccacctggaaccgccgccaccgtacccgccgccaccacctccaccgtaggagttggcaccggatccgccgtatccaccaccaccacctccgtaacctcgaccaccacctccacgaccgcctcggccgccaccgccaccgcctcgtccgccgtacattgccatctgctcaagctcggggatactgtcaaacacaatcaaaatcagcttgccatctcgactcgcgaggcgccacagttcgactcacatgtttgacccagcctcacgcaagatgttgaccaagtcacgggcctgcttggcgttgtcggtggtgaagtaggtgtacgaaacacccttggcaccggcacgaccggtacgaccgattcggtggacatagtcctcgacgttgttggggaaactgcgagagggacgagtggttcagctctcggtcccgatatcaagacttgacaaccaggactcactcgtagttgataacgtatttgatgtccttgacatctgtttcgagcggcagcatggtttatatcggtgggttcgaggtggagtgttggttgaaggcgagatggtcgggtgatgaatggtagcggggtggtgtggattgatcgtggtgatggcagcggcgggagcagcagcaggtaacagaagacaagagtaaagaagagaagcgatcagaaacgatgaacacgaacaccttcgaattggtggtggtggcgatggcgtagtagtgcgagatggcggcaacgatgcgaggggcatcgacgtcccgttcgggccgccgctgcccgacgcggttgctataggcacaacgaggtgacagatcccgctagtgcctcataggccagcaaagtccgacacctcgcatgcttacgaacgacctgaaagacagtgatctgtatcgcgtgaaatgacctgcgagcttccggccctggtcatccagcgtccaaattcaaaagtccccaagtcgaccgggcgtgacgcgtaatgctctgctcgaccagtgacgatcgtccaggttccgcctcgcggaggacctagacgaccgggtagtcggaacatgacctgcatgaaggcaaaagggagacgtgcagagacgcctaccgattacagtactccattgggcatgcgcatagcgttagacacggacaagcgcctcgaaagcagactaggctgccaatcgaggcggcaacggatgtcggacaggcgaagactgtccaaattccggtgtctcgtgcgacaagaccttcacgtgcagagatcgttccttgtgacgcgctcgaattgtgcgcgaggagggtctcaaaagcccgacgtcccaataatatttaggaccctccacgactcgtttcgaacgctgcaagtgatctcttagtagaagcggtcgcgcatccgttgatccgtcctcgacacccattcgaccgtttcgacaccgacacaaggaaaggggggaaatagaaaaaaggaaacgacacatacctagaccacgggaagcgacatcggtagccaacatgatgggcgatcgacccgacttgaactcggccaaaacccagtcacgctcttgttgttgcctgtgacgcaaaagggtaagcgttgaagccccgaggtggacgcgaaccctcgactcacttgtctccgtgaatggccaacgcgggccatccgtcttgcctcaaaaacttggtcaagtcatcggcgaccctcttggtaccgacaaagatcaagaccttggcgttctcttgcgagatttggtcgaggtgcttgatgagcttgcctcgcttctcaaagtcggtgcagacggtgacctcttgggtgacgttgtggttggccttcaactccatggaaccgatgttgacctggataaagtccttttggaagtcggaagcgagacgctgaacctccttgggccaggtggccgagaagaggacggtctgtcggtcaggtcggatctggctgacaatcttcctgatctgaggctcaaaacctaaaagaagagaacgattcgacgtcaacgggcaagtcgagcacactataactaccggctactaacccatgtcgagcattcggtcggcctcgtccatgaccaagtaagtgacacgcttgaggttggtcttgccgctctccaacatgtcgatcaatcgaccgggagtggcgacgacaatctcggcacccctctgcaagtccctgatctgctgacccttggggacacctccgtaaacggcggtgttcctgatcctggaagactttccaaacttggtgcactcggcctggatctggacggccaactctcgggtaggagcgaggatgaggacaatgggtccgtcaccgggtgcgagcaagggctgggcgttgatgtggaccatggcgggcaaggcaaacgagatggtctttccggaaccggtctcggcgatggcgacgaggtcacgaccggacagtgccatgggccaggcctggcattgaatggcggaaggagcggtgaaaccggaagccttgatctcggtcaagatgtagtcggggaatccggcctcgtcgaacgaagtgatgggtcgggggatgttttgtccctggacgagcatctccttttcggcacggaaggcctcgatctcacggtcggatcgggcagagacgcgggcgtcctcgatgtagaagctgagaaggaagaaaggtgaaacgaagaaatcagatgctaggttttcagcgagatgtattcaacgaaactcacttcttctcgaacttggaaagcgattgcctagcccagtcgatgttaccgagtccggcaccgagagcggccatacggtcaccgccaccgcctgtaagcatgagcaaaaaagaagagaccacgaccgtattcagtttcgactgcttcgttcgcatcggtcccgttgatgcgcacccccacccccataacctccagcatcggcatagccgtaactgccaccgccgtactgaccaccatatccaccacttatggctcagcccactcgctcagggcagggcaggaagggcgaggaggagcggaagcaattatgaaatccgtcctgccctgccctgagcgagtgggctgagccataacgatgatgatcgatgatgatgatgatgatgattgcttaaagggacaatcaacgaccccatgttcatggtgacattctcgatgacacggacattagaccacaacccctctcaatcctcagcgatatctgctagctagagtcgttcgtgaccatcttgaatatctgaatccgggagcctgtcactcgggcaccgacgtcacttcttcggcggaccatctccgccttgaccattcaaccgccgaagccacagagagagggttagagacggtaaaggcaggcgctaagcagcacattgaggatttagacgacatctctgatcctcaccagtctcaaccctggtcggaccagattcaatcatcgtcagcgacaatcaacggccagtcaatcgaacgaccggctcgtggcttcttgctcgacaatatccagtagtcgtgataccaacacgacgttggacccaagtgagactgtcagctcagctagacgagccgagaattaagccgaaggtcacctacggagcctccttcatcgttcgtcaactctcggtatgttccctgcgctcgctacctgttgtcaaagcgatgatctgacgagagagacctctctagtctgaccaaccatcaagactgcacctcgacgatgcgttcaaagaccctcgaaatcaggcaagtcccgacctcctttgtgccttgtagatccatccttctgactcgtctcggcccatctagttggcacggcacctctccgatattcgcggccgactatcaaccatggagtgcggcccaactccgcaaagtcttgccctttcccaacccgggcgtagcttcgtcctcgaccttggaaccttccacctcgaattcgggctcgggcccgatccccgggcttcctagcaccccttctaggaaacaagaagacgtagaagtaggcgggacttctacaccgatcgcttcctcttcatcctcctccaatgccggcgtcctcggatccagcctaggggtgggtgaagtgacgccgacggcgacgaggacgagctttgtccccgggttggacgctaccccgacccaggccgcttcgacatcggcgtctaataccacgggggggttcaacgcgtccgcagcgagggtgtataggctagcgactgccggtgcggatagttgcgtcagggtgagtgaccccccggctgtccgaccagggtgtgtttcatctcgtcaacccgaccgaccttgcgtactcttgttttgtcggacatgttcagatctggacggtccaccccaacgtgacggtaggacccaatatcaacgctgcgacgggactcgaagtcgctcctcatccacctcgagcggtgtacgctgcgtctctcaagagacacactggtgcggtcaatgtggtcaggtggagcccgaacggtcaatacctagcttcggccggtgatggtcagtacagtggggatgagagagggagagagcgattaaagcgagatgtgctggctgatacgtcctcacgggaaatgtcaccccagacgggacgatcatcatttggcatcaggtggaaagtcgggccgatatcgccacgttcggggaagacgaggaggaggaaaaggcgcacgaaaaggagttctggaaggaaaagaggatgatagtgtgagtcccggcgtttcggaccgacggatcaaggctgactccagatatcgtccgagtgtagagctacaaagcaggctatttacgatctagcgtggagcccggacgggagatatatcattaccggcagtaccgacaacttggcgcaggtgttttctgtcatcgacggtcagtcttgcttcaggccgacatcgatgaccacctttgctaatgctacacccccaacattcgattgtaggctcgtgtgtgcatcaaatccaggatcattcgcactttgtgcaaggggtcgcgtgggaccctcttaacgaatatctggcaacacagagcagtgataggtcggttcagagtctcacttcgaagtcgcaagacggcgtactgacgggcgtcctctgtcgcagatccgtgcaagttcactcggtcagccatcgtaacaacgccttgaccgtcagccctttcgtccgtgatcgggcgggtcgagcggggtcgcatatgaacatggagatccgaagctcgcgaccgccctcgttcagtgcgcttcggccgtccatgggcaggagagcgtcgacggcgtcggaagctggatcggtcatcacgctcgcctcggaacttcccgagagttcgttccccttgcaagccgggacgtcggcgagtacgcccgtaccttcgaccccgctgtcaaacatgaaccctccgaccaatattcccggatcgagacggtcatcgttctcctcggcggctgccaactcgcccttgctcacggccacgacgggacttcgagccggtcgatcgccctcacctgcaccactgcccgcaatccgaccgagcacgagcgtgccattgacaacgcagtcgatgaatcaaaagctgtatagagacgaattggccaccaactttttccggcgattgacgtttgcaccggacggaagcctcttgttgactccggccggacagatcgaagagtcgatcttccccacaccattcatcccggacgtaggggacaaggacaaggacaaggtaccgggaccgaaatcaagcgaggggccgaaaccgagcgacgcgtccaagtcgaccgtctatatctacgcccgggccaacttgaatcgcccgcccatcgcccatcttcccggtcaccagagcaccaccgttgccgtccggttctcgcccatcttttacgagcttcgcaacgtcacgggcccaccggccgaaccgaaaaagatcatcctggacaagaagaacccggatcccgtgcaagtcagtctgaacatgcctcctccaccgccaccttcgtcggccggagtcggtctcaaagagaagatcggacctacgacgacaggaggatcacagttgccccaacaagccgggatctttgctctaccttataggctgatgtttgcagtcgccgctcaagattccgtcttgctctatgacacgcaacagtcgggcccgatcgccatcttcaagggtctacactactcggcgtttaccgatgtggcttggtgagtctagcgaggctaacgctcgtggcagcgtgacgaggtaggctcatcgtttacgggtctgacattgtctaggtcgcctacgggtgactcgttgttattgacgtcgtctgatggatactgctccatcgtggtgagtggcatcagccgaacggtctcggtcgactttcgacgctgatgcatcaacacgtcgacgcaggtctttgatacggccgaactgggacctctgcatgcgacgcaacaacatcatcgtcaacttcaagcgatcgcgcaatcccactcgtctgcccattcgggcacgttctcgcatcccccttcccctgcgccatcgaacgccgtgcccgcgccttatacatcgaggatggacagggagacttcggtcagcagtaccggcttcccctctgcacccggatccatcaacgccaccccctcgccttttatcaccacggccgaacccgtaaagtctggtgaaggcgggcctggtgagatttatggacttccagctgggaacgtacctgtcagtcgaccgcccagctcgttggcctcgtccggcgtcgaagaagtctctgggaccgagctcaaggaggccatgggaggcaagaggagcgcagaggacgaggctgacggggtggatggggatggcaagtcgaagaagaggaggatcgatctgacccgcggatcgtaaggctctccccgctagatcgagcatgtagtatggtgctggtgggtcctcgtttaataggatcgaccgaggtggtgacgctcgaatagcggggcccgtcaattaatgtcatagataaaaatatatacataccaatgtcgtagagcatatcactgactgcgtctcggaaagggcttgcaattgcgaaagaggatggtcgatggtgtgggggtcaggaatgtcgacgagcatgacgctcttttgaggaacctttgccggtcgaccctgaagactatgatctcaagagcaattctagggcaggaccaacaccgatagcaaatgatgataatatattttgttcccgcagcggtcaagtgcggcatcatcacgatcatcacccatcactccattccccgattcatttgcatccgtcagccttcctcttcctccggatcatcatcattttgcttccgctaactgctaagtgatcacccatccatccatcatcatacaattccacactcgatgactgcggtgatgcacgtttctaaacttgacctaccccaaccacgatatataccgcatagtacagcgtacggccacatcatcatcgcctcccgttatcgttggtatatcatagcacactcactctcaataatcagggacacacagcagagctcgtccatacaacgctcgcaacgcatgcgatgaacaaacagtagatcgaccaaacgcgtagacgaccgttcgaacaacactaccagcagtagaaacaacacggctcaccggccatcatatacagccacacatagtccacaacaagaactcatagatacgtccacacgtgacagtatgaccggtcgggaccagccatacgatgctccgtattcgacggccgcggatgaccacgacgcagtcgacgatgacgggcccatctcgacgtccatcccgacgtcgcactctaccgagaaacattcggtcctggacgaactccttcccctcccgaccaccaccctcgaatccaactctccccatcggaacctcttgcactctttacgccgcgtgaccagtctgtcgatcatcgtcgggttcctgatcagcatcgtctacatcgcgtcgacgagccccgcggtggatcaagggatcaggaaggccgaactggcatggacgaggtatatcaagctgcacggcaaggtctttgaggacatcgctagtgagagtatcaaggaggatagcgggatgacggtcgcccccgtgcaaatcggggaggaggtaccgacgcagggtacgttgggggacgatcatggagacgaagggatgagcgtagccgattacgtgtggggcgaggaagacccggtggttcaagttcccgggttgacgctcgacgaggaccaagatgacgacgacggtggcaacgaggtcggacgaccggattggacaaagtacacgttcttgaggacgttggcctcctcgcatgcggacaccggtgtaccgggaaagagggtcatctttgtcggcgacgtccatgggatgtacgacaacctccagtgagtagacgatcgaccgacgtcggtctgaaccatgttcgactcgaaagctgaaaatctgtcgaccccgaccccgaacttctttagaaaactgttgaccaagatccaatacgacgcgtccaaggatttcctcattcacgtcggcgatctcgtagccaagggtcctgatccgctgaaagtgttgaaattcatgcgcaagaaccgggtacgcggggtcagggggaaccacgatgaaaaggtcgtcgaatggcggaattggatggtctgggcgggcactcgggaggcgaatcgtcgtaggcaagagacgggcgatgcgggtgcggccgagggcgaacaacaggacgtggacgaagatgaagacgggacgtggcgagcgttcatcaagtcgatggactggcaatacggtgccgacccgaaacgattgggtacggcattggccgacgtcaacatgccgttccccaaggactgggaatggcgatcggaacactggaagatcgcccgcgatatgggcaagaaagagcacgactacctcgtctcgctccccctcgccctacacatcccctcgatccattccgtggtcgtccatgccggtctcctcgcacgcgacccgacgaaaaaggccgacgcgacggatcaaccgttttccaacttgtttgacgaggacgacgccggctcgcccttgtcgcgacacgaggccgagcttgccgtgttcaccaagatcaagcagaatcgacggccgtacacgttgatgaacattcgatcggtgctcaagagcggcaaggtgaccaagaagagtaacaaggggacgccatggtcggatatctggcaacaggaacaggcgagatgtaaaggacccggagcgtggaccttgggtgatggagcgctggacgaggacgagaatgagggagaggaacacgccgggatcgagatgatggaagacatggagacgaggcggaaacacgtcgtactcgagagtctgcccaagttgaactgttccccgttgaccgtcatctatggacatgcaggtaagtcgttccccgcaggaatccgccgaagtgtttcgtctcggtccttctcgagggctgaaacggttcgtgctttctctctctcctctgcgccactcgaatagccggccgtgggctggacattaaacagtttagcaaagggctcgattcgggttgcgtgtacgggcatcagatgaccgccttggtcctgggtgatctgacggggatgaccgaggccaaagatcaagaggctgagaacgagaacgacgtcgtcaaaggggctttaggcaggaagggacggagagtcagggtcggggatcagaaggggttgttgatcgacatcgggtgtcctaaagaggcgtgatctgcttttatcggggtagggggcaaagaggtatcgctgtgcgctgtgaatcacgtcgggatctccttcggcgagcaataggggaataaatagcaacctcggacgacccccgatatctctctgagacctcgtcggtgggtttaaattagatgcgagctttcggcattgatcgttgtatataccccgtactagtttacattcgcacgatccgggaggcatctccagcgttacctttacctgtcctcactgtcggggaatcgggaaggacgttcccccaggccctccctcctctgttttttttttttccccttcgtatagggtcggacggttaaatatgaaacgtgacgacctctctttttgtgcgtcctcgtgggtttgttggcgcgtcccggccggtcgttacggcgggaataggaacgtgatcgcgcgcgaaatcatcatcatcatcatcgcatcatcatcgtcggacccttttgacccatcttccctcttgctcttgttgactttttcttgtctgcgcgagcgagcgagtgaacctgggaatcgcatcgcatcgcatcacatcacattcacattcaccgtccatcatccatagtcgccatcgtcgtcatagcgacgtcacaccgctcggcacactggcctggctgggcagtaaaaccgcgcagagaaagtgagagagccaaggctacggtcttttctcgaggcgtccatccgggagccgagagagggttttgaacgactcggagaggccgagccaagatgaggaggggggcaagagtgcggcggcggcgggggtgtggatgtggatgtggcgattgtggagcgggatcagacgcacggggacgacgacgttgctcgtaccccccccccccgggtttcctctctgttcctacggtgactttgcctcggcagccggccggtgatctatctctctctctccgtccctccttcttgccccgattacaattcttggaatgagacaaacgaacgatgatgagtgcgcctaaacgatgggtgatgcgtgatgggtggatgatcgcatgatggtttcgggatgatgcagcacgaccatcgggaatatgcatgccccactacactcacttactatcatctactactcactaccgtcaccgtcaccgcccccgctgatcgacgtcgtctcattagcaagcaaaggcgaagaaaaaaaattagaatagagcagaagatagtcgtcgtttgattcggattgtcaaggcaacacacatatccactatacctttggtagctcgtcggaatcgccttttgtcttgctttcttcttatcggccacaactacagctacttgctcgatcatcacgcgataaccagaggacgagaaagaaccgggacagctatacacatctagtcagctagtcgttactagagagctaccagctaccagcaactccttatcgatctcactttcgacctcgacgtacacgccagatcgaaactacgggtcgacgcaaaacactcgtcatgtctagctctacgtctttccctaccgtcaccctgaacgacggccgaacgatcccagccctcgcttacggtctaggttagtcttaccacatgcaccactccataccctctcgccgtcgccgctatcaaccgcatcaaaccataactgacccgaacgatcgccactcccctcccgcctctacgtgtgtcgtgatacccgtttggaacgataggtacggcaaactatggcaaaccctcttcagagctcgtcgagatggcgctcaaggaagccggatacatgcatatcgactgcgcacaggttcgttcaccctcggtctgaccagctgccgcacgcacggaaccgatttgctaaacgatgtgggataaacatttttccttctttttttggtatgtgtgcgtgtgtgtatgggtagatgtacgaaaactcggaatctgtaggtcaggggtggaaacgctcaggtttgaagagggaggagatcaccttgactacgaaacgtgagtctttcgtccttgcttctctggatggacgtcctggtctcgcattccgattttcatggtcgtaccggtgcgggcgaggggaacggggcggtacgaaggcgatcgggaacgagatcggcttggcacgtccatgggattccgcccggcggtcttcgtgctcgattgtcaatgccgggactttctcgccgggcctgcaggcgccgatgccgatattcctagtctcagacaaaggtcgcagccagcgtcatcatcatgggacagaatcgttgaccccctatctttttcgctcgttcagtgaacggaccggaccctcgggctggactcgaggccgagctcaagctgtgaggccggagctgatcatacatgtcggtccagagtgtgattgacaatctcctcgctctgccaacaggttgcaaacggatcatgtcgatctatggttgatccatactcccaaggtcagtcatcttgctccttgatggctcgccgataggttcgagactgacattcgccgttcttcacctttatccactcgtaggctgtcaaggagatcggatatggcaaggcctggagcgagatggaaaaggtgctcgagacgggcaaggccaagtcgatcggggtatcaaattacatgctggaccaattgcaagagacgctcaagacggccaaggtacgttcatgaccgcgctcgagcgaccggacgaccaaggtttcgacggctgatcgcgattcgtggcttcacgtacagactatccccgccgtcaaccagatcgagtttcacccttactgtttcccctacatcgagtccctcgttgagctatgccacgagtacggcatcacgatcgagtgttacggaccgatctcgcccatcaccaaggacaaaggaggaccgttggatcccgtcctgaagaggatcgccgaggagaccggattgaacgagggtcaggtcttgttaaagtgggcaaagcaggtctcgcgaggggtcatcgtgacgtgagtcgagatgtgcaaggatggccgggtcgctcaacgctgatcgagcccatctcttttatctgtctgcaggacctcaaccaaggctgatagactcaaggagcaattggctggtctccaggcacccgagctatcgtcggagcaggttgaagagatcactcaggttggacgaagcaagccccagaggttcttcaaaggggttctcgtccagcccgaagacaagcccgccgagaaagaacctgcggcgagcaaatcgaaaggattgcccctgagcagcaccctgttgttggtcgctctgttcctgcttctcttgcccttggccatggcgtcgccttcgatcctgatggctcgagacgggctcgggtacgccaacccggccgataacggtggcaggatcctgaccgtgagtttcgaatcgcctttacttggaatcatgtcgtatctcatcgtctttcacggctcgatagatcgctcaaaacacctggcccgagggactcggcgaacccctgaacgccatcatttcggccaactcggatccccgcgtgttggtcgactcgaaggacaatggcgggtttcagaactttatgctcgcccagaacttgggggaggaatgtttcggacaggccttgggaacgccgcaagaggcgaacctgggcgacgggcagggaaacaagaacgaggtgcaggtactgcgatggaactatggcgacatctacatcgggacatgcatcgagacgttcaagggcggtctgcacgctcggtactggtaccagaacacgacgtaggttggaccccatcattctcggctgcctgccaacctcgctgactgtttgcttcgttacgaccctgcagcggggctatcttcctcgccgtctccgaggaggaaggactcgagcgcaaccacgacatcgtgtataacggctataacctcggtcgagattggtttgtcggcaacgctaccaaccaagacggattggtctcgaccgctctcgaaaccgccaacgggacgtggtactcgggcgtgaccaaccagaccacgtactccggcgacaagtcgttcaataattatacctatcacaccgacgtccagtacgtcagtgggttgatcgccaacaacagtggttagtcgtgccggcctggtatcacacatgccggccgatcaaactgattcgctctgcgtctgtagacggcgtgaaccacgccgacaagatgtcggtgccaggcatgtcggctgtcgacggcctcgtcgccgtgctgactgtgaccattacccaaacaccagaagagtgagcatgtgacgcgatgcttaccaaagcgtacatggctgatttcgcccgaacttgcatcaccgttcccagcttcaagaacgccgccatcaagctaggtatgcctacgctcggcttgttggcgaccgccatggctatcgggtttaccctatgatcggcttacgaggatccaagctctgacgaagagacaagatcatttacgcccgtgcaacgtgacgaggatcaggacgaaatctgacgaggtcgacgagagggaatgccgagggcgaggaggggagggtagccactgaaccaaacaaaccccgacctattatagaccgttttccaaggtgaccacatcttttccatgctagagttcgtatcacacactgtatcacaataatcttgccagcatgctagtataaagaggtttccgtgtctcgatttgtagatacatcggtctcgcaacctgcatacgactttcaaaatttcaccaaagcgatgccggtcagttccgacacctgttccattcgaatccggattcaataatgacagcaaacaacgagctcaattcttggaaaaggctttgcgaaaggcgggcctcgtacactgatcgaaccattctgatccgagccctttctcgcaccgctgaagacttcgccgcgttgcccatttatccacacgacggattgtgacatggtccggcccccccttcctcgccagcaatgggaagagaccgatcaaggagaacgggctggcttgagtcgaacgagatcaagtggagagacaagcgagacaagctacacaagggaagtggaacacttcgaacggatatgggtccgacatgatgtatctcaggtcaaggcctgaaccccctgagatgtggaatgtgacctgatgacacatgaccggccaattaccagccgggatgcggtaagggccaaaggagtggtatgggaagaccctattcatcgtttcagcattgccacagagaataaagatcgcgtggtgttgcccctgtatctctaggttgacgagggagaggcctagatctcgcttgatctcgtttgcgataatcgaggcgacgtctgcgaaccttcgagacagcgagccgtgtgcagtcgagcacagaggcgacctcgaggttcgagtcagacgctaaggacccaaatcatggtatcgagcatttgtacgaggacaagcgtgacgcccgcttagcaaaggttttcgccttgaaatcaaattcggagacgcttggtggtgcacagatccccaatgtcaccggtaagctggaaacgggcaaagagatcaaagccgtttgtcaccgactggagactggctttgggatatccaatgaaggtgtttccatgttgtcctatgtgatggcaaaacttgaaatttccttaccagattgatgatcttactcttcggtaacaaattaaaacgccgagatccgagacggcagcactcgacaccaccatcgtccaatggggtacttctcgtttcttactgacgggtgtctacaaacacgacaggccttcatcgccttcgtttgatcctttgcacctcctgacaataatttgatctcacgcagcggttgatttgatcatctcgagcctctttcagctcagctctcgccaggagtgccagtctcaatctggtcggaataagaatggcatggaaacctgacaacttccgataacgctttctccaagtcacatttactcgacgttcccgttgtagaagacgccatggactcaatcgtatgataccctaacttgcaaccggaggccattcattattatcccagctagggccgtctcagtctcggcgttgcgcacgtgcgaaacaggatttaaagtggatcgatcacctgagatggacgaaatgaccaaccagactgttcttgtccctgacccaccgtgcacaaaggacatgctcctcctgatatccctcacctgtgcgcacctgaccttgcactcgctctccgtatgacgtcgacaaacaagaaatacggtgttgggtttcatcttggcgcgttcgctcccgacgtgacttagcgtctttacggccaaaagcgggcccgagacaatggccgaggtttatggtctaggcgtgacgacctatcttgtcgtactcttcccactcgaaatcggatcgcatataggaccagccgtgagtgatttgcggatctctgatagcgaggggggctagtcgacatcgacctggtcaaatacaaccgcgacatctctcgacacgtaaaccaacctatgctcgcccggatgaccccctttcccttcgatgacaagctggctcctccaccggcctacgacacgatcacgctgggtagcaacgatcagtctctcccagatccaactgccgaggatgatatccccagcgaagccgggccatctgattatgctacccggcctctaatcgagcccgtcttcggtgacgccgtgacggccaactatcgtctctcgctcgactttcactacgagagcccgctttcgaccaatctcctcatccaggagacgactaccgggagagacttttaccacgcccaggtctccgagtggaactgggctaatcccgacgtcatccttcgccgacgggcgagggcggggacggtcgtcggctcggccgagttccggtggggtagggatgtgacgatgaggatgggtggaaggggcctcaagggggatcccgaaggggagacgaggagcaccgtcatgtccaacgacagccgatggttgacgcataacaagtacacgctggtcatccctgccatcggtcaaccttccggcacgtcgagcaaagaaaaggacagtccgccctacgtgggagggcggacgctgatcctcacccgaacgcagtctgacaaggacgggatcgttaacgtccagcagaaactcgctttccagaattacaaggttcaggacgcgaccaccggcaaggtgctcgccatgtggaacgagagacgtatcatcgacgtcgtcaccaagggcacgctacggctcgtcaccacggacaaggcgtccaggttggccggacctatcagtgtggacgagcagaggacgatggacgaaaagtgggagcacggtgaagaggaggaggacgggctgcagcaggaagaagtcgattgggtggtcttggcgtttacgagtgtggcggagaagacgagaaggaggcgggagtgaagggagccggcgctgacgggcgtgtttcagagtagtgtagtcgatcaacaccatgtgaagtgtctcgataagtatgaaaacctcgtatacatacaaagacacaaaggccagtctgtgcgccttgttgctgtgctatcaaccagacacatcgagtaacctcctcttgttgaatattgtggttctgacagatgtcagtcatcacagggcgtatcacctaaacgtcgtctccgatgggacatgtccgttcacctctatcgggctgcttcctgtgcatcacgcattctgcaatactcgacgagcgggatgtgaccccgggaatccctgtctgacgagacgggacgagacactatttaccccaagagagcctcgtctctactgaaccatcacaagcgcgtctctgctgttttacctatcagcacaaccaacctgcgctcgcgagctgatccgacaccgtgcttttacgtgaagaggatctgaccctgtgcatacgtatcaagcggggtgtcgcccatgtcgctcaggtcacgagtcttcgtctttctctcctcgagccatggcctattatccgcccgggttggttaaccgagtcggatgaaacgacgctggtgctcggtgttcttcaaaaacatacgcaaacagttctgaattgaaagcgctacaaagcggcatccttgacacactccgagatccctatggtgtactcggaccgagctggaccgtacggccatcggcaacttacgagacggtcatttgcaggcgggctggacctagtaccgacccgggccgggcctggaagtctggctgggcacatgatgcagagatgaacagatcagagttgtagtgcggctcatcaaagatcgacgacggcagccgtggtcgatcccaatgactccgctctgttcatccatgccgaacaatatcggccgagttgaataggtatcacccatctcgcaatctcgatcagtttttgaattacatccggcacgcgtggccgaaggcgaatgcgaatgcgtgaatgcgtttgtgtgggttgggggtattccaaatatggaataaggtgacatgacgacagacagcgcagattacaacgaatccaagttgaggggtcgatcacgtcgcccaggagggcggggggggggttgtccaatggagtgaaaggccagggggagcgatcgagtttactcggaagacttcttggtcttcttggtagcgacggttccctcactgatcacaaattgtcgtcgtacgggtatcagcaacgcgctcggggagtaacaaaaggaagagatggagggggggggggacttaccggaatccgttcttgaatcgctggtggaccgacttcaagtgagaagcacgcttggatccggctccgattcgtcggatagccttggtggaccactggtatttacggacagaggcggcggggaaaccacactgagcgcaggtctgtagagggtgcggggaatccaggtagaatatcgggcaagagtggtgaaaagtcaataatcgacggacgtatcgagacgtatttcggaggaggacctcgacactgaccttcttctgcaagtggaaggaccttcgtccacacctcctgcacaaggtgtgcgacttggagtgggcctttccgaaagagggggttccctacgagttgcaagccgggcgacgacgacgacgggtagagaggttgtcggaggaatgaccagatcaatcagtgataagaatcaaaggaccttccgtcagcacatccatagccatggagtgtaggcacgatggccatgagggaggggagggggtttgtcaacgtactttggtctgcgaagatcaaggagtgagggttagcttgcgggtcagcgtgataagaacgacgtggaggcctaggtggtgggacgtaccatcttgctgggaactcgacgttgacggtgaagagattaggtcggcgaaggtgggaagagcgagatcaagtctgcgccgagccaacgatgcgtgatgaagtcgatatggtctttgaccttgaagttaggacgtcgtgcgaggaaccgagtccggggtgagggtgtgtacgagattccaagagcacgcgcgggcgaaaattgagaagagacttagtgtaagttgggggtaacatcatagaagcgcgccacgccgtgtgaagaagcgataagcgcacgatgacacgcgtgagaaagcgaaatagctctcgatcacgtgattcaccagcgctgaattgctgaccacccccaccccacaacgacgcgagctctcccaaatttgctagaaattgattgacaacacctcgatcatatataacacgaagcccatgacaacacggcattctgtgacaccggcacccatctccatctttatcgtccgaccgacaatgtaggggccgtcgcaaatcgagcccctggttatgcaacccgtgagtgtcttttcttctttgcatcttgtctcgtagacccgcacagcgggtcaaatcatccacgacatccacctcctttcacctcccccccctttttatgatgacccaactatttattctctccccgtctcatcgaccatgccgaaacagagcaagcgcctccgtcgctggagtgtcgcgaaaggctcggacggaactctctacggagcaaagtccgagtttccattaatgcttttgccagctattttgtctgaattatacctacccacaaacaaattaccttcgtctcctttttgatactctttactttcgaagtcgtgggctctgccgacaatgacattgaaccggacggtcgcttacccccatcgtctccgctcttgtcgtcgacagatcttttaaccatcttacgcacaatggccgacaacgacatcggccacacacaactctacgatataagctgtctcttgtacacatctgacgctgccgacgacttaataggtgtagatctcggtggtcgccgtatcattaaaaaaaaaaaaaaaaagtcggttgtcgaactatgaggtctttgttcgatatccgtcgatgccgctattgttcttcgctcatggtaatatcgaatatgcgttgtgtcgatcgtagagagggtgacgagaccgcgcgagccgaagccagccgcgtaggaaccggatccgcgtcgcttcccgtaacagatccggtcgatccggttgatcagcggctcgaccaaacaagagcaaccggcggcggtggactcattcgagttcgattgtcctgaattcaccaaggattatcagttcaaccccgccctgttcgagaccatgccgcccgctcccaaagctaccgcggcacatgaagaggaagatgccctggcggcgctcgtcttcaacgtggccggcactcgtggcccctctatcacgaggctgtagagtatcgagaaggaagataggcactttctccaatcgttcgtcatgatcaagcgtcgtccccaaagaatctgccgatagccttcttgtacacatcttgcatagcaccgtcaaactgaacaaaggtcacgctctcgatctaccggtcgcaggatcgatgtgtgagccactagaatgaccatgtgcgtgaacgaaaaacgccagaaggcggagaacctaccttgtggtccttgtcattctccaagccttctttgacggtcttgaccgcgatctctgcagcagcttcgtgcggatatccatctacgttttcagacgagggcgaacgaggttatcagactgtctcagactcggtcggccatgaagaacgacggaacgttggactcacatacgccgcagctgatgctaggaaaggcgatctgaccgcccccgttctctaccaagagttcgaggcaccgagaatagcatgatgcgagttgtcgtgagcattcctcggctcgggaggaactgtaaacgggtccgacggtgtgcgcgatgtatttcgccggcaactaccgatgatgacttgcggcctggtcagatcatggcgtatagtcggtcggttgagcacacgaagcgaggacttgccttgaaaccaggagtgactttggcgtcacctgtcttgcaaccgttcaacggtcgacaggctttgagaagttcgggaccggcggctcgatggatcgctccgtccacgcctcctcctcctgacaagctgttgttggcggcattgacgatcatgtctacctgaaatacgtgcggcggtagattcagccacgagagcaagaacctttgaggaagcagtgacccgccttgagtttggtgatgtcacctgtaccgcatagaccggcatcaacgagctgactctttgcaacgattttgtggtagacttgccggtatgaagcttgattctgttagccatgttgctggtcgcgtcgatacttcgcagaagagtatggtactaggtcaacgttcgtattacacttcaccaggttccagtctttaacctctgtaatcgtatgaggtcaggttgccaacctccttgatgtctgacccctcttgacctcctctaacctggcgtgacatcatcatcatcagcgtgcccgagctcggttcggcccacgatcaggctaggtcggaatcaatttgcatccggaattgtacccaccacccaaccgatatcatacaatggcagatgagcttgatcaactccacaggattgtgttgccaaatccagtcatgtccggtcacccatgacccatccatacacaaactaatagattcagatcaaccatcaacactgtcatgccagcggcaggcctatcgcggacgaaaaggaccgtctccttgctcgtcctcggtctcatcgttgtggcttcggccacgcagactgaagtcgccaacgtcagtcgatcgttccttcccggcctttaaagctttttatagtcaggctgatactggtcggagttggtggaatagtacctaggcgccaaaaagggtgaataaattgttggctcacaccgtagcatccaccggaaaaggctgatcctcgggtctttatgattgatgaggctacagcaaaccgtactttacgttgtgagcctgaatcattcgctatctgttgagacttcgtcaatttgagctgatctttggttgcaacgcggtatcactactctcgcttgtagtttcctgacccactccttctttgctatcctcttccctctacacctcctcgtgttgcgagtgatccggccgcaagacaaccctcgatcgctcctcaaaagccttcggcaggtagtcgctgcccaagtcggtatcacgacatcagtcatgatcttgaaactggagctgatggatgttcctcgaatgacgacagctagggctcgacaccgaggacgctaccgccgttcaccgaaagttagccgcggtcatcctgaaactgacggctctcatatcattgtgagcattcagtgtcgttccacaaaagcaccataattttgatacgatccgacgtactcgtagaccttcaatatgctggtatatcgccgttcctctgaccgggtaagtgttgagtgtcacggatttcgcttgctcctcgaacagccaacagggtgctcatcgaatctgccgctcgcccgcaggaccactgacttgacgacgatctacgccaccgcgactttctggacttatggcttttcgttgctccttctcaagacccccttgtccagactggtcgtcctgtcgatattcatcgcctttgccggagtcctcctcatcacctactcgggcgtggaggaagccaagcacaaacaccgccatgaaagtgggcaacaccagggagagatggagacggaacctcctcatagaatgatgggcgatctgatcatgctcatcggcgcgatcgtcctggggttctacgaggtaatttacaaaaaagcccttccggagggtcaaggaggtatggtcgccgagccagtcgatggagcggatagccccaacggtggagtctaccaatccgtcttggacgaagacggggacaccagcgacgtccgcccgcccgtcctccctacgcatcgccgatcgtattcgaacccttctcctagatccagcggcgaaggctacccgcccatctctccgctcgattcgggtacgaggctgaacggcgctttcaaactcgctcccccttccattacgagacccaagttgcctctcgcgctgcacgccaacatgctcacctcgttgatcggaatcacgacgttctgcctgttttgggtcccgatcccgtttcttcactgggtcgggtgggaacctttcgaattgccttggggaagttgggggctgatgggaatcgtctgtgcgaccggggcgatctatgtgagtatgctcgtcttgacagggtcacctagccgtccgctgatttttctctgattcgatcatgtacagaacgccgggttcatggtacatctctattctcaaggttgcctgcatcaaataaacagtgctgaccctagactcgcccgaaacagattctgatcggacttctaggaccgacgaccgcttccgtggccaacctcctcacgatcgggttggttgcagtgaccgatgcgttctacctcggtcatacaacgccgttttggaccttggtcggggccgggttggtcggggcgggctttggtacactcttgtgggcgggggaagaggatgggcattgatcgactggactgaggacggcacggacaatatgagtttatacccgatcggtccaggagacctggatgcgatttttatttgctctccatggaccatgctcagtgcagtcagccctccgatcgtacgccgtgttacttgatggttggtcattgcgtcttgatcgcgtgggccggccttttctgggaaggcaggctgtatgccataagacgataggtattgagcttgactctactattacaagctctctatatggatgaaggtctttgagggtaccagcatgattcgtcgagccgtggtgttgaacccctacgcctacattgtgattataatatggtcgaaacccgaagtggacgtagatgaaatctaagccgggccgagtcacatcgcccttgaggagcagatatagaagtaccggtcgtcccagcaacatgttcagaaactccgtatgccaacgatcgccactcctggcaagatctctcttgcaaagttggtgtgggtgctgcaaagcgcaacgagaagatggttgatcgctcttgtaaagactgacggtcacagttccccaggcaaacgagtctccggccacttgtacctccatgacaatcatgccgagcggggtgagtataccggttgtgtcgatagtctggtctagcactgagcgctgagtgatactgctcctctcagacagcagcggctagcgtcttcaggacgtctccgatctcgtgcttggcatgctccatctgctgagccaggactgcctcctctttttcctttgccacacgggatgtttcggtgtcagatagcatgacgagcagtttgagctgatgggtcaaggcgaggagagattcggcggattggatgagattctgggtctgcacttgcaaggccaggtgcgaggtagcagtggatgctagactcggttgcaaggatcgctagtgatttacggaggacaccgtaatcagctagcaggacaggtagagagagcgatcgttcagatgtacctgagcttccgcgacgaccttgcctagaccctcgccgagaatcgtgacgtcctggtcgactcgcttgttccaccgttcttcccagacgtccagatactgcgagcggctctggttgagctgaggcggtaggaactgttgtagaggtacagcggtcattgattgaagtgttgcttggagtattggtctggtgcagcccagtagctagcactgcatggaaagtcatcctgacggaatgatggctgatgtatgaagcactactgtgaaagtgtgggcagtagctgaagaggagggcacataagcgagatgggcagcgccgagtttatgcttgatcagtgttgattaaacatcgtacaatcacaatcggccgattagctcagctggttagagcattcgtctaatataatgttagccgaaaacgaaaggtcggcggttcgatcccgccattggtcattctttttgcccgatgcgagctgtttttcttttttccgtcgaatacgtatcaacacagctcatcccatcatgtaagctgcgatggggttgcatgaatgcatttcttgattggagcacgaatcggaggagtggagagcctgcgggcgtcgacgaacgatcgaaatcgcgtgctgcgttctccatctgaaacgcgctatcgcacagccagagcattcccccaggttccctagaccatcggctattcgcattaccatcgtgtccaactttctccgccgtccggttcacaactcgtccgatccggtgtgggagaagagaagagacgaacattgacaaacgcaatgacctacgttaatttatagtctgggaagaaggcgttggatagctcggatttcgtggaaggatcgcactgtattactacgtcgtatttttcaaggacgaggcatccttcaggcagatcggcacccagctgcatctcaaagcccctctaattctgttatcgttcggcgatgtgatctacgatttttttgatcagcgtacgagatctcaatcgatgctcaaataagacggtcacggcgcagtccgtcgtgagtgccaatagcatctcggagacgtcctgttgttcctgaacattgtatgagattaccgatatcagcttggccatttaaacatcattatctgcctggcttcggtgggcagacaatttaaggagatcgaggaagcgtccagaggctcggtcagacgacagggggatttcccagaaggcttgggctagagagatgagagggcagatctggccgaaatttgtaaatctcggaggttgcccaacgacgccgacgggaccatcttggtacccttgatctacgtgcaagacgtcgtcgattcgagctggcgatggtccatcggcaggcagactcagttctgcgacgtctgtgagttgcacgtcttccatgctgctgacggtgatcacgtcgaggttaagcatccatccagagaggacgcgtgtcggaagagcttggcaacagactgaccaggtgtacatggttgttggtttgatctgtcgacgtgtgcgcgcatgatcgtgcaggtgtggcctgggtcgacaagaaatcaagcagacctaagccccgttccggacgcgcgtgtctgtctattgacaggggcatgaagagcatcaatccaccggactcgagccagctgcctgggccattgcgacatctggtgaccgtctgggatgacattgcctcgactaaaaagaacagagctgtttgggctactgcagtacgttgtctagtctgattcattccggaatgaatcccaacagatacagtgcgatcaagtgtcgtcacttccgtattggatatcaattttaccgtggcaattctccacctaaataccacataagcggtgtgttcacgcacgtcgcttgactgctacatccccccggccgagaaacgctgacatttaagatctgcccgtaccatcagacctgggccgtgggcagtagcctgggtcatcgcggtcaccgtctaacgtgataatccctggtcgcggtatcattcgctatcctgccctttgcccaccctctggcatatactgtgtcgtgtttcagagcaacatcatctattacaatcgctcatctctagatctcctactacagattcatcattatcttcgttatcagactgggtgcgaccactgctggagcagtttcgagtcggttcatctcccgaagcccatcttcttgtgagctcggcattcgctccgaccctctttctctcatcgaaagaagccggcgcagttgcacaaggctgaggtgtcgacaggctggacaccgggtagccacgatcatgacttttcacggtatttcttgcgagacggctttcagactcgtcttgagaggcgtattcacggtcgtcaatcgatgtagatcgtcctgccattgggcctccagacagggccctgatcaaatgcggatgatttaccaaagtgcgataattgaccgagttaggttttgataccctttcgaccaggccatccggtcgctcttcccgcaattcagcgtgatctgcgtgcagaatacccggtttgaggctggctcgaggcgatgcaggcgacgtcgtttgcaggggcagcagggtttgtccgccgacttttgggctgaccagggtgtcgcgggctgggactgatcgcgagatctttctgactggcgaggcggctccaattggcgtttctgcgctcccgccgacactcactgagctgatgccgatcgctggtcccgacgtgtggtcgcgtgacgacgacatcaattgattaaagccacctcgttgcaagactggagctcgtcgtctcgagtctcggtcgttatctatagggataggagtgctcgcagagtctccacttgccgacgtagatggcaaaggaggtggaagcgagtgattcctcgacaggctgacttcgtgactgttgcctggcagtgattgaacatgtcgatcgagcgtgggtgcatttctctcggaagcttgatggcgcagttgctcttggggcagattgaaaggctctggtcgaggatctgatcgaccgggtctgtgcgagggctgtgcaaggcgcgcttgcccctgctgatctccgtccgagtactggtcatgatcggaagcctgtgccgacgcgtatgattccatgggcgttgcctgtatcggggcttgggccaaaggcgaactgctcttgacgctcgatcctaacctagtcacaaagccgacatcacgggtggaagtggtctgtgaaaaggttcgttgggcttgttcgctagaggtaggcgtctgatcgttgcggtcactgactgatagcggagctggtcgattgtacgaagatgagcgcaaggcggaaggaaccagtctatcaatgggcgagaccgagctcgaagtcgcgagagcagatcctgtcaggggaccgcctccaggttgcgcgaagggttgggcagcgagcgtgtagcttccagccatcctgttcagcgcggcatccacttcggccttggtcatgcgtttcctcatgaaagcactgccggcgccaggtaccatcgaatcggcaccagaagatggacccgagtcaccaggggaacctccagcaacgggtcctcctgccagtacggaatgccgcggatttgacagcgacgacgatgtcgatggcaggtacgctcgtgattgcgctgtcgaagccagtgaaggcggtctaggcatgctctcgagcgttttgaggaacatgttgatatcccccttgtcgggcgcattcgaaaatgatggctgtcaaagcagcaaggtgatcagttctggtacggttaacatcatgaacgaaaagatcggcctcaccggacgtgaagaactggacaatcgagtattggtcctgctcatgctatgcccaccggccccgagcagactcccaggatcgaggctgctcgcattggaactggccgcacccggcgtggcacccagtgtgaacgacggccttctctgtccaaaagaggacgagtagcgcttgagactttgaggtgcggctggtacaggaattccgggtcccccatcttcctcgtgatattcgggaatgggtggggtgggagtcgaatgatggcctgtcagattcggtcgagaaggaatggccgatcttggaatgctacccgatgtcggactgaggttgctagggcccctgaacgagcttctcgaagggctcgtccccggctggctccctatactgctcaacctgggccgtgactcgttgagcaagctaaacgacctgcccgagcttgataggtacgggctcattcgttgagacgaatattctctcgcttcgaggttgttaccggttctgatacccatcgccaagggggaagaacgattgcccaagctcgaagacgcgccagtgctggtgaaagtaccgctctcatgcgcaagttgtgaaccgcgacgagcaatgcccagaccagccaacggagacgtggagaactgtaagaaagggtctcagctatcctttgtctcctagtatattggcctgggtcaacccacctgtcccgatgaactcgctgttctcggtctctcaccagcgccactcggcgtagtgacaggtatgccctgcctcgaggatggtctcgcgaatggaaggtcgccaacgtcggcagctatcgcagccagaccaccaccatgagctggactgaaagattgaccacccacactccctggtcgagcgtccataccgataccggcgcccgacccgacctgagattctgagatgaccctacgcggtctctgaggtttggcaggcagcgccgttgtcaaagtgtcgtgcgacggacgacctgctaccactccagtctctcccggagaagcccgatcgagcgggatgtttgtatctggggacgctccacgatgaccaagcgacgcaaagtcaggcaccggtgtgctcgccgtactggcctttctcctggccgtcagtgtcggcgtaaagtattcctcttccagatccagttgacccatgtccactccctctgcgtcttgctttttggattgcaggtcgatccccgccaaggcggacgagaggatggactcgacgtcttcggcccagatgtccacctcttcgcgagcttgtacggagagggaaaagaggccgtgcgagaggggcagagttgggaattcatattcgtgtagcttttccggacttgcgagaggatcgacctgctcgtcccgccttttcccaagaggaccggatatgggcgaagagaacgaggagagcggtcgatctagcccgatgagaccgtgttccatcgtcttccacgcttccgccagcccctcttcgggcgttctcttgcggtaggtgggggaccgtctaccgggacgatcgtcctcactatcatcctcgtcggtcccgtgatcgctggttcccccttccctgacccattcttcctcgaaaccatcggccgaccagagtttcactccgacccggagattgcctgcggcagatccgcctcgtcgtaatcggcgaaaaaccttgtaagcgggcaatagcctgacgtattggtagagcgatcggaagtggatgatccccgatttgtacgaggtggatgacgatgggtaaggggtctgtgcagcttgtttgccaccatctgagaatcgtggatgagccggtcggataaaggtggacgaggacgagatcgagttgagcggcgaggtcgaggtcgatgtggccggcgtgggatccgaagggatctgtagtgaacgcaaggtccacctctcgagaacgatcccctgggaccttttgggacctcccccggctcgttctttgcccttgtccttgacagcctctgatggcaagtccaagcggtacgtatcggaccccggttcagacaccttgtacgcgccttcgctgcctcttctgtagaccagtgcgtgcttcgatgggaggtccgagacgtctaaaatgaaggctattaggaggggcgggacgatcgcgtagggagtggatgtggtggccgggaatgaagtcgaaagggacctgtaagcctctaaatcggggcggaagacctcggggtcgggcaagggcaagttgaactgttcaatcgagagacggccttcagggctcatatctgggcaggacagactactcaagatgaagacgtacccatttgtcgatcctaggctccttcttgcctttcccagcaccattgtgcgtgtcctcttcccgacctgatgacctccgttcattcgggttcccgatcgacaacctcgcctcggtcaggacctcgaccgtcttgatgtagaaccggtgaacgatctgatcctgtctctgttgatcctgttgaggcgatatagagtgcgtagacatgattgccgccgggtacggtgtggaagctccagaaggtgtacgtcttgttgtagaaaatgtagaaggggatatcaagtgatgacgattactttgaaggtcggtatggccgaggttagaagcgtcctatgagtcacatggcgtctgcccgcctggtcatcggtagatcatgcaggagaggtaagactgtgaatgtttacgaatcggccagaggtgtcgtatataatcgagtagcgagtagcgagttgattgtgatccttgaatgatggtcgcgatgaatcggttgtcacctgtttgtccctgtcgccgcctcggccatgagcgacacgaccgagacgacgcgatagcgacaagttgagcggatcgaccgggaccgaaaccgacctgacgcacctaacgatatcaacatcgaatgcatgctcatcgagtgaaccgacgagcctgcgagatacgagaggcagtagaatggtacatgtttgatacaaggtcgtgggtagtgttcatcatctataagtagccagagcgaacgaagcggtaggaccaactaccaccgctgataatcccccttgttctccccgcccgacatctcgtacctctcattgacaggcgtacccggctggacagaagcgtaccccgcgactccggccgcagcattctccttgtcggcagcgttcagcgcggcagtggctgcaaggtagacacagagagagcctggtcagcgccagggtgtcgacgttgcgggacgagaaacactcacgatcagagataccagcacgagtcccccatccagtctcgtgcaaggtgcacatggcgtaaagtttcattatagcgctgaggtcaggcgttaaaagtctcgttcagcattgtcgcccggcatcacgaggctagacatggatcgactcacaaataatatccaaagatgatgaacgcggggacgtagataatgtgcttgggattgttccagagatgaggcaataatttgagcgtcctcgttaccgtcagccagacaaggtactacaaggacaaccagtttacgtcagttcggcgttccccctctcgacacgtttctcgaccatgcccgcggctcaccgatacgatgatcctccatgcgggcaagtgatatccgccgtcttcaatcgcccgggtactcttccacagcaacacacagaccagcgccggtcccgcgagcaaggtgaacgggttgatgaatcggtcgaccatgctgtacgcgacataagggtgcttgtgccaaacgtgacgctcggtgaccaaactcctaaaatcgctcctgaccgtattcctggtccatcggaggacctgcttcaggaacctccagttcggcttcatcgtggacagtagttcggcctctttgcagacctgcacatacgtgttccacccgtggctgaccatccatcgggtgagaaacttgtcgtcccccgagttcaagtgatacttgcccatccaaaagtcgtgcgtgaaaccgtggatgaattcggggtccttgaggatgacggtacggtaagcggccgtccttccggacagacacggaattccaccatcgatatgggtcgagctcgagatttcaatgttcctgatcgtcaatcggaaagcggccaggacttcccaaacggtcatccgtttcccgcacggcttgacccgctgacccgtcccgacaccaccgacctgctgatcctcgaaacaagcgagggtgtagggcaacaacgtgggcggccagatggcatcgtcatcggcaaagacgataatgtcggtcgttgtgtgcctgatcccgtgcaccatctggagacgcttgttcgccagcgggacggtcaacacgcggatcttgttcgggtccaccgagttggccaattcttgcaacggtcccttcatcgtctcttccgtgacaatgatgatctccttgggattaccctcgagccacgaaaaggcggcctctacacaacaacgcgtcgcggtcagtgccagagtgcgaaacgagttcgcgagacatctgacccacctctgaattcctctccagcatcgatggtcggcacgataatcgtcacgtcctcgctcgcgatatatgttggattctcgggcaggggcaccggacgatagacagcactggctatcagtcggatgcagtacctgcgggtcgagacgggaggatcagctcgaggtcacgcttgcgagcgttcgctgtccacggggggcttaccagaggtatctattcgattcgatgaggttcgaaataattttagcattcgaggtcaatgttcggccgagagaacagccggctgatcagacgtaccggtagaacctgaaaaatatattatcgaagtcaacgacgttgtcggtcagctaatgaatgacatgaccctgggcgatccggtcgagcttcagcctacccgatgatcccaaaaggtacaaaaacagggactgtgagcaattacatcagcatctagtcttgctctgtaaacgatcacgaacgccttctcagattgagacttacacttgtcggcggttagataactgtcgagttatagtgtcaattatagggtaagctatccggtcgacctgagcttgtcgcgtctcgtgcggcctcgatccacttacagcattttgagatccgacagtcgttaggatgggttcgtagtatatagtcccaaatatatgaagcagcaaaagctcgttgtaagagacgttatttgaatctgtcccgacgtttgagcagaggctgtgatgatgcgacggggaggctatgcgaacctctgtcgatcgaaggggacgggtgttttgtttttcgtttgtcgtgaaaatggaccggacccgcggtgggtgtcagaggggaagagcgtgagggagactccaggcagaacaagtttcgctatgctgtcaggcctgattataggtaacgaatatagagcatacgagttgcgagttgcgagttgaatctggatgatgagagtctggactgacggtgagacgagtcgatttcgtgatggtagcacactgctgcgggcgacgtcggtcgcgctcgtgagcggctgagcgggctcgggatcaacaaaaatacaaaagtagagcagctcggcgacttgtacgtcaggattcaggaacgtatcgcatgcaacgttccgagatgatcagtcatacaagaggctacaagagatcactacttgctacttgctactcgagaacggcatattagacttggagaacagcgagcaagtgaggtcccaagtgtgatcgtgtgatgtggttgtccgcagtttgtatgtgaaagcgaaatggtcgttcggggatttgttggccgccgggtctcggcacgcgaattcatttatttcgcgtaagtggcggattttcactaaaccccggtcaacaacgacgacgagctcgagacgacctggaggccggaggtcatgttggtgatggtctatttgtgatgtaaaagaatcctataggagtagagtgaaagcagtctgattgctggctgcaactttacgggcatcttcatactttgaacaaaaatgcaagcgggatgcagcactgcacagccttgttcccggtgaagggctcgacgatgaccacgcgctcagcgccaactgttattgacgaatgacacactcatgatcgaggcagtctcacttgtccgcccgtcgattttcgtgtatataatagatcgatgtctgttccatcagggacaagaaggatgaaatgaaggaggacacgaaatgtttgggtctcaacgacggcgtccgagcatcttgcggggtctgctctgatagacacgcgcatagtaatcgccatcgttcgtcttatcacaattattgtagatgcatggacatttccgtgaacaacatccgtaccattgaccattctcagtatacgccttccaggtcttccaccttgatcctgatctttttcagcttttctaggacgagggctacgtgtttcgctctgtgtgggtagaattcgagaaatgagcataaatccgaagcgatatcgcgccgaaagtcgacgtactcttgctcgagaccgctcgctgcggacgttggcacatcgatcgcgcggttatcacttcgcttgtcattttcgcgctgcatttgctcaaactttggtttgatagcgtccaactcctttcgaagctgcaacacgaccgagtggtcaacttttcaattcccatcgagcccacgctgcgttctggctacataccttctgataactggtcgtcagctccgaagcctctccggtctccttcatcatctcggctacccgttccatctcggcttgccatgccttttcaggatcactcaagtcgggctgcacactgttgatcaatttgccttgcacatgagctagtcggctggcgagatccctttgcgtgcgaaggatcctatcataacgttgtttcatctcgtcgacactcccacccgttccctgaccgagcagaccctcgtcctcgtcgtccgtggaatctccacgcagatctgcaaccttgcgcatggcatccttgatgcgttgcagttgcagcgctacctctttcacctggagatcagcccgaccctcgacccgtcccgacaattgttttaggtcgagtatggcctcgccatacccttgcatcacgctaccgatcatcttcagatcttcctcagagactgagtcgattcgcttgccacccgaggggccgatctggacgttgttcttgagcttttgcatgacgacgtcgaaagactcttcggtgatgttgtatgcctggccaccgaggtacgacgatgggttggcagaagcatccttcgggccggcgctcttgtcgagtcgagatgccaagagctcatccggcttgtcctcctcgatatcgtcaaactcgttcagctggcgcgccgcggccgtcttgtcagaagcgatcgccaagaacgcgtaaccgagttcgatgtctgcaaggacgacggatccgataacgggtactacagcggtgtcactgcggcgacgagcgcgttagcaatcagtcgaaatgcatcgcatcttgacggctcgaaacgtacgcttcttgaccagaccatgtgtccacaatccaggcggactgggatggagacctctgcttccacaactcgcccagctctttttcctcttcgtctgcgtcttgcagctgaacaatgtgcgataacgatgtcttccattgtctaaagccgatccagtgggcgcccaatacgtgatgtacgaacaaggacgatgagtccattgggtcgacggtgaaagtggtcgggttgcagatgagcggagtgaacgactccgaggccgattcgagcggctccaggagctgcaggtcgatcgagtcgaacgtcaccagtgtcaataacgggtcctccgcccagtcttggttctggtagagtcaagaagccagagtataacggtcagcacaaggacctcatcatgatcccgccccagactcacatcgtccacttcccactcggcctcgaccttttgtgcttcgacgcacagatccactctgccatcgacccaagccacaccgacgacgttcatccccgtcctcggtcccgccccagggcgggtcgagctcttgtccccgaggacgacaatgtcgctggcgaccccctcaatcccccaacctgcttcttccgacaggggtagctcccttggttcaggctggacgagataaggtccctgtcgtttgagccgtcttccatcccgaggcggccggacgggataatgacaccctcgtcgatcgtccgcagtgaacccgtccgagctagccttgtgagcgtcgatttggcgagaaagactcctcgcccatttctgctgagcggcgagtttcttcccgagcgtgtcgtgttccgaggacgaaaagccgatgctctggcgcgaactgccgagatcggcttgattagacgtggacgatgacgacgaagggttctgaaggcggtactgctgggccttgctaccgaggtacaggttgagcgtctcaacgtagacctcgggaatgacactatggggacaacgagtagtcattagccctagcacagcaagagagccgtgccggtggaagtagccaaggacgaggtaacttacgcaaactcgggcaaaaacgggcagatggtccagacgtccccattcttcatacatccccaaatagccaacgcaccccactgggcaggggtttacgagagattatggaagaatgcgcgtcgcgtcgcctactgaaacagggaaaagtgacgaatcatcatcatcatcatgacatgaacgacgacgctacaagtatccttgcaacctcaacgtccgtctcaccctcgcttcgtcccatgcaccattcccacattctcgatagtcgggaaacaaaggtgatctccatatctctcgcaacaacgacgtcttgtggcccgcatccacccgaaaagtcgccgggagcagcatcaccgtacccccacgaacccccacgtcggcatcaacgtcggccgtttcgaggtcggggatgaacagcctgatctcgggtcgcatcgatcccatctttttcctcgtcgtcgcgtccacacccggggtatcagtgttggaagcgcgaccagacgccatcttgtcgtaagccttgcgacgcgctcgatcgacggcgagttctcctttccaaagcgtccagacggtcgagatcgtcaaggcctacgagcgagcgtttcagatgaatcccacccggctcactcgacatcagtgtcatcatcctccaaggtgaccacgggcgggatcgcgaggatgactcacgagtgcgacagaggaaaagatgatggccatccctagcaaaaccaagtagaacagactcggttctctccccctcggcactcccatcactgcacctacaccagcgcctataccagcaactgtaccctcgtacctcttgtaactccagacgatccccaacgcccatcttcctatcggaccgggaatccaggcgtaccacctcccccaccataccgcccgcatcgtcggggatgcgtaggaccacgcgaggacgagaccgaggtctcgcatgacgagtgacgtaggtgggatggcgatgaacgagatcccgagcggggtcagggtggtcaagagcaggaacgccttgatgtgggggagggtgaggcaattgttgaactgtccccgaaaccagccccgtatgcggatcgcgttgcagcgtcaatcagctttcagtggcacgagtggcgagtgggtatcacggatcgattctcgtatcgacgcttcagaccgactcacccagggacaatgatgatcgaacccgaccctacacctcccgcagacggaacaatgcctcgtccgtcccgtcttccataccccgccgcatcgacccttgtagcaccgctctaaccgcagctcctcgtccaggctgacgaacccgagcggttgatcagccgagcatgtaagcgggactgagcgggcgagtgcgctatccgggagagtacgggatggggtgcagtggtcggaggggaggaggaggaggtaaaggaacgtccggacgatgccgaggatgatcacggtcgtcaagacgatataaattcctgtcgagatcaagaggggcggaaatgatcaggttttcctgtgtctggtttccctgatggaatggattcaagccgactgcggttcacggcgagtcggactcacccgcataaaatcgtctaccctgcgatgcccagatcaagaggtacccgatctcgtaacaacagacgtaccacgccgtactacctttgcatgtgtgtttttccgtcaacgattgctcttgcctggagtttgggacaggagccagtcgcgcaggggctcaccaaaagtagacgaggaggagggtcgagatgaagcggcctagcgttcgggtaaggcgtgcgttgcccatcttgagtgtccctagcgaggtccctgagagctcctatgacgtcgacatcatccggcacggtgtcgaaccctggttttatgcatgagcgataccgacatgatgtcgctggtcgatgtatcatgaacatcagtagtgtcttgccaacccctcgtcccgtagtagtagtggcacctaccttgtgttttggtttcacgtgattttgacaagttgaacatatgttgatggttgacatgatcgtcggaacggattcgtcatttcctaaaagcaagaaatgtcgactcacactgaacacaccagtctcgactcgtacgcctgcatcggctcattgtccagcaaaacacgatgtctttccgtgtcttcaggctgagccccttgtgcagaccatccgcctggaccggtcggactcgatcatgccgagcgttctcatcgtcaagcccggcgaggatcgatgacatcagcgttggcaccccggtcaaaccagagatcaaaccgtactacgtgaccactccgatcttctacgtcaacgctgcaccacacgtcggccatcttcattccctcctcctcaccgacgtgctcgctcggtacgcccgattacgggacccgggccggcaggtcaggttcgctacggggacggacgagcacgggttgaagatccagcaggtggccaaggggctgggaagagaaccgggtgatctctgcgacgagattagcgagcgattcagggtacgtatggagcggagccccagcggtgtagctatcgatcgggatcgtcgttgatctatggtgttctcttgcaggccctggcaaaagctgcgaatgcatcgaataccgactttatccggacaacagatcctgctcacaaactcgccgtacaacacctctgggtgagcctctctcgtcccttccaagccctcgcctggcataactcaactgaaacatcatgcatttacccgcttaccatcagggccaactggagaaagcaggtcatatctacaagggctctcattccggctggtatgccgtctcggacgaatgcttttatacggaagctcagatcggggacgtcgtggatcccgtatcgggagagtcgaaaaaggtcagtcgggatcttcgcgcgacctttcgcttgggatgatcctcgacgctgacttgactggatgggctgtgccccaatacaggtcgcactggagagcggctcggtggtggaatggacagaggaagagaactacaagttcaggctgagctcgttcaaacagagcttgatagattggttggagggtagtccggattgtaagtcgagcgctatcatcgtcgtctttcctgtgctacagcactcactcaccggtcctcgtcactagcggtccatcccccatcgacccgatcacacctcctcaagactttgcagaccgagcctctgcaagacttgtccatctcccggccggcttctcgactctcgtggggagtccctgttcccaacgacccggagcatacgatttacgtctgggtcgatgcgttgacaaactacttgacggtgctcgggtacccgtggaagggagaatcgggcagcgaaacgctggatctcgagcggcggcacgggtggcccgttgatgcgcatgttgtgggtaaagatatcgtccggtcagtagccaatgatgtcgatacatgtgcccgccgtgacggtcacatctaacgcatggacgagcaaccttcgcagcttccacgcgatctactggccagcaatgttgatcgccgccggtctctcaccgcccaaacaagtcatcgcccacgcgcactggacgatgaacaagtcgaaaatgtcgaaatcgaggggcaatgttgccgatccgttcgaagcgatggagaggtacggcgtggattccgtcagatggtacctcatgcgtgtcggtgggagcctttcgggggatgcaggtgaggacgtggcaatgcctgaccagcaatataggcacgggctgattgaactgatcccggccgtctcgcagattactcggctggagagatggagaagcattacaagctgctcgcttcgcaggtcggcaacttggcctcacggaccgcatcgcccaagctgcaaaagcggttcctcaaagctgccacgactcatgcagacgcgacatctctcgtccaccccgaggtgcaggaattgagaaaagcgttgctccgctgtcgagacgtccttgaagagcggctggacgcgctagagatcagtcgtgggctcgaagaatcgatggaaatggtctttgaggtcagtctttgggggtcgcaagccgagaatcaagccgatcgactgaaaggaatccaccttctacccacctgtgatcacgtaggccaaccgtcttttcactgccctcgagccgtggaaagccgataccaacgatactgacgtgatcaacgccatggtattcgcgcacgagtcactgcgcctgctcggtatcgccttgacgccaatcatgcccaccaagaccgccgagcttctcgataccctgcacgtgtctacggaggagcgaacatgggaggatatcgcgtggaacgaggaaggggctctggcgcgagtcgtgcagagcgtgactgctgcgatgcagacgaaggggaagaagcaggttttgttcccggcattgacggaggaggtctagcgacatatcctaacgaactcgctaccccctgatcgcgctctcattcgctatcgggtgatgagcgggttctccatcaggcctagtgaccctgatgagcgcgttgtccagggcgtagcccggaacgtcagcttgacagcgagtcaggtgtttcaaaggagcaacggccgatgacgtgttctttgagcttccgagaagcactggaatcttgccaggtgtcacatgcagtgagagacaagccggagactgcatttgggaagcaaagcatatctcgattagagaccaaatgtcagggcggagttccaggaacatcgctgggaagcatctcttggctaccaaatcagtgataagatcttgctttgtgaaacacatataatgcaacgtcaaggatcgtttctgttcgtcgacctcgctctcgtgggtttcaccaagagaatatcttatagacgatcagacatcccacggcgcccaaatgccagctgctccgagtacttctacgctcgacggggccatagagtttgcctacgatggctacaagtgcattctatccaagtccaaacatcacttgaccacctggatgcggcccgaatatcattcaggtagtttatatgtacaagatactcagcaggcaggcgagactacagatgaggagccggctattgtagtcgccgaacgttatcgacaacgccagatccgtttgcgactcggcggaaggacgttcccggcacatgaattgattgtcacgcatttcgggagtgaggaatccctcaaatggcttcaagcggagcttgtccgacattgggatcctagtgcaaatactagtactctcaagaatgtcatattcgcgcacatcccggataaggagaagctctgggtcgtacccaagaccggaccggggtcggtaagaccgcttaaggacgatatctctttcaagaacggacaagagtcttacgcaacagaatcagcctctctcgcgaccagcgtcggagtgacggtcactttcgaagcatgcgaagcatcgaaagtgactttggctcctgaactgccaaactcgaatcaagcaccgctgtcgacgccaaccggtgaaatcactgtgggctaagaccgaggtctgatttccagggtctctggcgccgtgtagcttatgcctggacgtcgcgtagagacggtccccaccatccctcagtcgggacgtctgcaatgtttgttgtgatcatgtatgagctttgcaaatcatatggaactctttctttacgaccaagaagtgtgctaagggctctgctgatcctcttccactacggctgacatggtcagaagcgaggagcgctaaggtgagtatggaacgtatttaattttgaccccgcgcttaggtgatgaagatgagtcatggctatggtgtaacaaggggcgcatggggcgatgaaatgcctcgagcagatactttatatgtcttagaggtaccagttgcgatattaatcgagacgacaactcgaccgactcggctactcgccgatcgacggttgctcgttgacatgttcgatcgcttgggagcagcttatgtgtcttagtattattggacaagggaccctacgagtaacctgcagtcagctcgtgtccacatgtctgccggctagcgcgaccgcatggctttccccatctccgtgttacaccttgatcgatggggatccctatgctcatgcactccgtgcctcccgatgatgtgcaggtgatttatgaacataaaggaatgctatgatcgctgctaccgagggatacagtcccgtatcggttcattcccagcctgcactgacggatgattggacggtcgaggtccagtgaagactgattgcgtgactgaagtccgatcagctgacgagaatgccccgtataagattaaattacccttcacaaatggactctccctgctgtagtaccgtattcaagtcaacacggtgtagcgtagattcgactgatccgactgccctagaggcgtcctgaaaggaggactctcgcacgccggatgagggttctccgtggtagactagctccattgaagaatgctgccatcagcctgttacgttggtcagctgcgacaaagtctggtcacatgcacgactgtatctttatgaaaggagagaaatcaatcacggtcgagaagtggcctctcccagattggcatatatagaatatgggaacagctcggccatatcgtcagccccagtctgaccatggtcccgtccgcaacgattttgcgaggagacaacacagcatggcagctgaatatgaatacaagatcacctttcgaggaccgtgcgagaaggaggactggccccaagtcaagacagaggtactcatcgagatcacgaaagaaggcgtatctcttggcgaagcggccgagcaagagtatgcgacctctgaatacttgatggtagtatccagtacagcccattcccaacagagactggcggtttttctgctcgacaataccaattccattcgagagaaatgccgcaaagtggatcctgattggagaccacctccccctcccctcactatggactcatactcgaaccagtccacccaagatacgaaacagactgacctcccggaggacacgggagcgaccgatccgactcagggatcggctagatctgttgtctgatccaagtcgaaggaaagccgactttccttttggcgactgagtacggtggtggatattatgacacgtagaagctatgatcatgcctttcttgtgacctcgtctccgctggtcctccgcttgttttttttccttttcaccctgtggcttcaatgaccaactgcagctatccttcctttgggaggagagggggccaaattgtactgatgactcaattcgtcaaccgcatgtaagaggaccgaggagtaaaacatctctacttgacagaaatcgccgatgagcttgccctacctagagcgtcatggtgtcggtgcaaagctcatcagggataacaaacccagaagggattgatcagactccaagggctacttagggggattgtctgaattgctgtgcaaactatccgccaagctgtcagaaacaacaaaggcagagatggcgattgcagtgtctgtcttggtatgcgccccgtcgagccttaagcgcgagcgcgttcaatgacgtaccgcccatcccaatctggcaggatgcaagcggacggtgacgaagtcgtgaatgtagattgattgtatccggatcctgagagcttaattgcccctgctttgacctgcttgatcgacgacctttccagcttggggctcacgatgaataaacgcaatatgcttgtcgcgtggcgcgatgatcttcagctggtcagctgaccgtggcaaatcagcgcattcgggggatcaattattaacgaaacgggaaatcgtcattacgacatgagaacaaaggagaatacatctgacttgaaactgcgcagcgggagggtattatactgttcgtcccgcaacaacactatataaatcagcgtcagcctttcccccggattatctcggttcacaccaagattgtgccactctttcgccaaaacgcgattcctagcaatatatcatacataagcagcatggagcatcaaatgcgtaccgaaaaattctacactgacggagtggagggagttttcgtaatagactcctttaaagtgacgctaaattatggcttgaaggatggagcggaggaggcctggattagtattagacccttgcatcgatcctctggccctgaaacgatcggattccatgcactaaatcgaggagttctgggtgatatgcaaatatatggttactcgctcatctttgcctgttcgaccgctcatcaggacgaagacagcttgaaggaatggctgtatagtgccaacgctagcttgagccaggaggtcgagaagggacctggcaattcacagactgacgcaggcatcgcatttccctcggccatagacggacctgcgaaggctcagagcaacatgtccgccggaacggtccctcccaatagtgactctatccccgggcgatctctcgaaagctatgagaccggattcggagacgtagtcaccggggctcagtcctctgccctatctgctcagaagcgacccatatctcccgatacggcgtacgagcgcacggagacaggctacactcccagcccgacctcaaaggtgccgagaccaggctgagttgtatggcaagctagaatacctctgtaatcgtaccatccccgcgcgacctcgagcttttcaccgaacgaaccggcgcatcctgttcgtctattccgtatgaaaggcttgcctttgtatgtgattgtcatctttcacatcgataatgaatctaccagtcttctttttattgcgtgtacgttacaacaccctggtcgctgccccccttcccctccttactcgtccttgaagacggcctttcgcttttcggcgaaagcagccatcccttccttttggtcggccgtggcgaacaattgctggaataggcgccgttcgagacggagaccctcggtcaaggggagctcgttggctgtgataattcgcggtcaaccggggcagtcggggacgaatgtcagcgatgtttcccgtagccaataggagcaggcagagtatgaggaagatttcgcctggacatacctgcatcgacggcctctttcccggcctgtacggcgacggcaccgaaccctccgatcttctttgccagggcgatagcctcttggactacgctctttccctcttcccagacgaccctgctgacgagtcccatcctttcggcctctttggcatcgatcttgcggccggtgaggaccatgtccatggcgatcggtttcccaacgatcttggtcaatcgttgggtacccccagcaccggggatgatcccgagggtgatctcgggttgaccaaagacggcggtgggggaggcgaggaggatgtcgcacatcatggccagctcacaaccacctccgagctgcaggttcggggggaaacgggagcggggagggccaggttcagtacgagtgctggtggatcgagcggacgggttcgggactcacggcgtaaccgctgacggcgccgacgatgggtttcctgaacgaggtgaccctggcccaggagcccaaaaagttggatcggtagacctcggcaaagttcttgtccttcatctccttgatatccgcgccggctagagtccggacggagagtgagagacgagtccggggataggtgagccgacgcgcgatcgagtacagaataaatgggatgggatgacgacttaccggcaaacaccttttcacccccggtcaggacgatgcatttcacctgatcgtcctgtgcggccttgtcgagctcgctattgagctggacaaagaggggcgaggacaacgcgttcagcgccttgggcctgttgagagtgagcacggtaacgggaccttgacggtcgacgaggacgagctggtcggcccccccggtggaagaggacgacatgaatcgggcgagatctaggcggttggtcgacgtgatgacgggtcgcaactgtgcggaagagcgagcgaacatggttgcagaagaaagagaaaggtcggcggaaatgggctaacaatgggggtgaggtacttgcgtgtgtatatatgcatagtgcttgctctcatgtaacgtgactatatgggtagtagttgtcccgaggtgatgagtggtgtgtgagtgtgattcgagtaaccggcgttcggccgagcttgaccggagatgagtttgatgacgggagaaagccgatggaccgaataatcacgtaatatcacgtaatgatattacctcactcgcggccgttaacgtcactttgtatgattacggcatccccgaatcactcgttcacccatcgatcggtcaacgacgagcgacatgtaacaactccatctcgacctccaaatcctcgtgacccatcatgtacagcccgatggtacttgccacatggcttcaatcctcgcatcgagcgagcgtaccaccggatagtgcccccgatgaggatcatcacttggaacgtcgtgagtgcgaatgcgacgacatggcaagacagcgaacctaaagtaaacactatagaatgcgctccggacggtattgccgtatcatccgtaagtctagcctttggatgcatttagcggttttttgacaatcaacgtatcacccgaatcagatgggccgagctctcgaacaagtcgatcggcgggatgctggatgccatgaacgccgagatcatctgttttcaaggtcagcctcgttttactctctccacccaagtcgagatcgctgagacccgacccccacccacaaactcatacgtacacgtccccgcagagcacaagggcagaagagacaatatggacaaacccacggccgtccctcctcatttcgacgcctttttctcgttcccacacggcaagggcgggtacagcgggacttgtgcgtacgtcaagacggactatgccgtccccctcaaagccgaagaagggatcactgggagactgctcaagacccccgggggaaactcggctatgagcaagatggtgtacgacgaaagggagatggtgggtgggtacgtggacgaggacgggctcggagtcgagttgagggataatacggatggtacggtctttgacgttaaaaagctggatatggagggtcgcgccgtcgtcctcgatttcgggtgagtaccgccaagatggtcgcctggtggacctcgatcgaccgacaggtttccgaccctggccatctctcgttgcccgtgtcgttagctttttcgtcatcttcaacctctactgcccaaacgagacgaacgatacccgactcccttacaagctcaactttctgcatcacctcgaagcccgcgtcgacgccctcatgcgtcaaggccgcaacgtgatcgtcctcggggacatcaacgtctgccaccgaccgctcgacaatggcgagggcgggatccagagaaacgccgaggagcatttcaaccatccggcgaggaaatggtttgacaagtgggtcgctccgaacggcgtcatgcacgatgtcacgcgagaggcttggccacagagaaaaggaatgtttacgtgtgagccaaataagccaggaggatgacgttcgtcccgactttgcgaagcgctgatcagccgatgatcctctgtacaggttggaatacgaaactagacgccaggtgagccggatcgaccaatggtttctggggaacgaccgcacctgaccccatgatctgagcagaccgtctaattatggggcacggatcgactacattctcgtctccgagggtctcttgccctggatcaagcattcagacatccaagccgatgtctttggttcggatcattgtcccgtccatgtcgacctgcacgagtccatcgtcgatcaagaaggcaggacggtatacctccgggatctgatgaatgcgggggatcggatacccttacctgcccacctggaggcgctcagggacgaaacgagggaagcccctgagccgcctccttttgcgaccaagtggtgggacgagttttcgggcaagcagagaagtctaatgagtttctttgggaaaaaagcggacgctcccgtcgtatccagctcgacggctggtcaacgggagaaaaagtctgagccgagaaagagggagagatccatctcgacaaacggacaggctgagccgtcaggtacaggtctatcgacagctccgactgaggatgaaaagtcgcctggcctgctgccgcccatcatgataccctctgctggcactgtttctctacacatcgactcggacgtcgaggaggatgtcgtcgtcaccgctcgtcatgacgccctacaagaaacaccgatcgaggtcggatctagtcctatcgaggccagccctgtatacaagaggaaaatgacctcgcctaccgccacgcaaagctccaaggggagtcagggatccaaggcgagcaagaacaagcaaaaagatgtggatccgtccggacagacgaaactttccaactttttccgtcagccatccgcttcgccgtccagctcgacctcgaaacccatccgaaagccccacagacgaaccgactcgcgatcgtccaccgggatcaagactgaccatgaaccgatcgagattgacgacgatgcagagatcgaacacattcccacccgttcccctgcaaagcccgcaaacgaacacgatgatgaggctctcgccatggagatggcgcgggaagaggaagctttgatgctgtgcaatggtgaaaacaaggtgctcaccgagcaagaacaggccgttgcagtcaagagttgggggagcatctttgcgaaaaaggtgcccccgagatgtatcgtacatgacgtaccgtgcaaatcgttcggttggtcaatcgcaggagctgaccagcacgtactcgcaagctaagcggatccgtttcgcttcgcagtatcaaaagtcccgggaagcaagggaaagaaattttggttgtgttccaagtgcgtgagagagtcggccttgggttcacgtcgaggttgagcgctcaacacggaattttacaggcccgtcggggaaggctgggataatgggagatccaagcgacctcgaaacgaagtcaaccatcagtttcgttgtgatttgtgcgtcccgacatcttgcccgcctaaccttgtttgccggctgaccacgccatcaaatttcagtttcatctgggactctgctgtaaagcaaaaggaaccgtcagccgatgaaggcacgatggactcggaggagagagcgaacaagaggatgaagacctgacgccatctgcctatgaccccctgtaacgccacgacgtatgacgacgacgactatcacgacgaatctatagctctgtgcagcatgtgtggcaagcaatattatgatacatttcacgtcgcctagatctcctcatcagcgtccatgacctcgggatccgtctcgtcgtccagtccatcaaccttttcctcgtcgtcgtcgtccagatgaatcagatcgtgaatctcgccctctgcctctgccgtcacctcgatcgataaccgagcgtgaatgagttcggccacaatctttccgtctgcgaggagcgatcgatcgatcgatggtgagtgagtgatacgcggagcaaggtacttgtagggaccgcacgtaccgatgggaatctcgttgccctggaatccctctggatacgccacctcgggtgtatcgggagcggtaaagtactcgttcccccagaacccgtagtgcatgataccaagagctctcgactgtgatcaccaaagagggattttggatcgtcaacaaagtccctgagctccggccgactgagttcgagactcacggtaaactcgtaatcgtgggcgaatcccttgggaaagaaaaattcgatgacggtcgctcggggtgtaggtttcatccagagtaagtgagtgaggctgcgaatcgggcaagacgataagagaccgcgagcacagcgattcaatctgtcggcgccttgacctacccatttccatgcacacccaacatgatctgttcgacaaaatgaccgtttcgagggggtgagatatccttctcacgcacacctacgtcgcctagacgtcacgactcaccgtcgtcctagctgccaacctgatctggtcatctcgtgacagcttgtccatcgagacgatgttgacctggaaaggaacccggacgcacattcagccgacctgggcaagacgggcgatcaggaccgaccgatcgtcccatgcatgacccacctcgtatccatgttccttttccaatcgctgcaactccttgaccaggacctcgtggtcctccttgatcaacatccgtcgtccccaatcctgcctgctgacgtaggtgatgaccggtcgttccagatcgtgcgggttcaagacggcctcggacgtgcctccgacaaactccaacaagttcctacggacgggactccaccagtaagggctcccctcgagggtgaacgcctctgccgccgtcctccaggtgacggcgaactgggcacctcgaagcgctgcggccctgtcggtaaagacgacgcgatcgtagagataggctcgtccggaatcgacccgatcggcgaattcgctggcaaactcgtacgacatcgaggggaagacgctcttgcacaagaacgtattcatcttggagtagtccctccatttctgatcgtcggtacgggtaaacatcagtcgtcgcggagacgggagggtcgtccggccttccgaagtgatgttcttgtccaatgtcgaatacgtcctccagaacccaaacaatgcctctgccgcaaaactatcgatgtgcggtgcgtccccttgagcgagcgatcctagctcgacgtggggattctctttcggtgactcactggtagtaatgatccaagaactgggaaggatcgttgatggcccacgtcgtcccctcgaccttgctcgcctggtgtcctattgtccgtttcgcctcggaggggaagatgatcttcaaatccttgtccgtcggttccctgtacgcgacgcgacgcattcgccctacgacatcaacctctggctcgggcctcgaatccagctcgggggcggggggcgggaccgggacttaccgattcttgatactctcctcgtcgttccagatttccgcaccggtactcgtcatcatcctgagcaaggggaaatccgagggctcgtccgtgacgatgaaccaggtcccgttgaagaggtacaggttgcggaggatcgtccatcctgtgcgatcgaacgacgggggcgcggggatagcgtacgaggatgtatgagccgacggtcgatcgggtgagcgagatcaagagtcgaaagggggccatggactgacctggtgcgtgcgcgacgatctctgtccgtgggatctctccctcatcccacctgaccagactatcgttcatcgtcatctccctccacctgcccacgttgccctgactccccagctcgttgacgcctaccaatttccctaaaaaggcgtccgacttgctaatctcctcgacgacgccctgactgtcgagcgtatccaagctcaactgatcctgcttgtaacccgacctagacccgtccaaccctccagcgccgatggaccatggcgcgtgacccatgatcgatctcgtcccatcggccgaggtacgggcgaaatcgaactggatgatcagggtgaagaggaccgtcatgctgatcacgagcaagagttctctccgggttaatggcgtcgatgccaggctggcgaatcccgagtgaatcatcctgggctacggcgatggcgatggcgaccgaggggggtcgtaagggggtgatgtgtgtgtgtgtgtgtgtgtgtgtgtgtgtgcgagtgtttcgattcggtccgagtagatttggatgaacagacggtcgaccagcaacagatgattttggatgtggggaaagtcgtccttgtttgctttgcgatcccaaagggtatatgtcactcgattatcgaaccgactagcgagcgagacgacgagtcgcgctcggggtccacctgtcgtcgacgagacgggatagaactgagctctggaagccgctccaagagttgacgattcgccgagggaacaagaaggatgaggatgagtgagtcgtctctagagaccgagggatgttgatgtggtctcgatgtcccggatggatgatatggtagtagcaggactctacctaacccacctaccaagctggctacctacctacctgctattctttcacctgagaacacatgtagacaaggtgcgggaacgagcaggagaggagagcaagcaaggggggaagcagggcagggcaaggcaaggggaaggggagggaggacgcgcggggggaaggttcgggatcggatgcaaaatacaaagcacacgactcggccctccctgcgccgccgcggctgtgtgcgtgcgattatacctccgatgtcacacatcccatccattccaaccaggcaaacagggtttattcttctcacacactacactatacaatgacctttttcccctttttttccccctttgacaactaggtcatcttccaagaaacctacaacgatatggtaaaacacacattctccccgtatctcctctcgatcgtgtcggtggtgctgggggagggtatagacgactcgttccgttcctcttgttcgatctcgttcctttgtacacacgtattcgagaataccacgacgagggtgaaaaaacaacaacagcagacaggggtataaggcgtggcgtccggctccacgatacgactgtagacgtggttctgtatccactctacgtccccataacttctcggtcggtcaggggtgtcccgtcccgtccctcttctttcgtcttggtataggggtggtttcggtttcgactttcaacttgggtatcattctcgctggccaagcgaggggtgtatggccgggggagtcaaagacgagcataaggggccgagcacgccggctaatcgtgatgacggatcatgacttccactccagccgcactcgatgttgatctggtaggcgccccccccccccccccgtgccccccccccgtgctgaaccggccgtcatctcgcgcgaaaaacattcccaactcctcgacccaacagctcacctcaacccagctcccagctccccaaaagataacacggacctctttgtaacaaccacacccgtcactccctcccatctcctagacttccaaaacacaggatattcacataccctatctatcaaaatgtttgccgtcaggaccgctctccgaactcaggtcagtcccggcgtccagcagagaacaagcatcgtcgagagagagatatagagctgacaccgttttcgtctccatcgacccccgtcctcttccatctcccgacccggactcggacctggacccggacccggaccacatagacctcggtcgcctccaggggttacgctaccgccgccaaggcccagagccttaaagagcgtctcgccgagctcatccccaaggagatcgagaacgtcagtatcagtctcagcgagacgttcattcccggtcactcatcccgcgtcgtcgtcctcgtcgccatcgtataggtcaaggctgtcagggccgcccatggacacaagtctttcggcgaggtcaccgtcgaccaggcgtgagtcgcgcggctggcccgacgtcgtcgtcgtaacccggtgtcgtgctgatgacgtgtgtgcctcttccacctcgttcgtcgacgttgtcgttgtcgttgacgccgatgtagttacggtggtatgcgaggaatcaaggtcagtccccccccccccgccgtggtcgactgtgcgaatgctcgacctcgggaccctgaactgacgtcctctctcgatgcaccccgcagggcatgatttgggagggttccgtcctcgactctgaggagggtattcgattccgagggatgaccatccccgagtgtcaagccgccctccctaccgccgagggtggatccgagcctctccccgaagccttgttctggctcttggtcaccggggaagtccccacccaagaacaagtcaagggattgtccgccgaatgggcagcgagggcctcgttgcccaagtttgtcgaagagttgatcgacaggtgtcccaacactttgcacccgatgtctcaattctctttggccgtcaccgccgtgagtccgtgagcgtggcgcggtcgtggatcatggaattgacggtcgtcctgcgccggaatctagctcaaccacgactcggctttcgccaaggcctacgccgagggtacccacaagaaggagtactggaagaccaccgtgagtttgactggtctttcgaggccgccgtcgccgtcgctctcgctgtcgaatctcatcgacccgactcgacctgttcgcagtacgaagactctatggacctcctcgccaagctccccgtcatcgccgccaggatctaccagaacgtctacggtaacggcaaggtcgccgctatcgacccctccaaggactggtccgccaactttgctaccatgctcggatacggagacaacgcctcgtttgtcgagctgatgaggttgtacatgaccttgcactcggaccacgagggtggaaacgtctcggtgcgtctcgggttccaggggcggtggtcttggtgaacgtggggaaatctgaactgacacgatcgtgacgaccgcacgtccacaggcccacaccggtcacttggtcggttccgccttgtcggaccccttcctctcctacgccgccgctttgaacgggtgagtcgaacgatgactacgagcgtgtgcatcacgagccgggccgtgctgaatcacatctccgcgcgcacgaccctcgcagtctcgccggtcccctgcacggattggccaaccaggaggtcttgaggtggatccagaagatgcagagccagatcggagaggacgctaccgacgctcaggtcgaagagtactgttgggagaccttgaagaccggtgtcattcccggatacggtcacgccgtcttgaggaagaccgaccccaggtacacctcgcagcgagagtttgccctcaagcatattcccgacgacaagctcttcaagctcgtcgcccaggtgtacaagattgcccccaacgtcttgttgaaggctggaaaggccaagagtgagtcggcaagtgtcgcgcgcgcgcggtcaacgggaaggcggggacgtccgacgattttggcgcgttggcgcgcgcggcggcgacttttcgcgacgtcaagcagtcaatactgatccgatcttgctcccaccgcattgcatcgtcttgtaaagatccctggcctaacgttgtgggtctgacagggctgtaattcctttttttagatcttccgctgaccttttgcgcgttacaggacaggaaagttgatttttgaaatccggaaatcgcgattttttgctaacctgctctagtttttcgccaattttcgccatatacagccactctgtatgtccacccagcacgtgggctcagttctagctatccgctgatcagataacttgattttttgttgcaatctcgcagggagtcctcttgaacgctgtaagtcgcgtcgtgtgaaaggcatgcatgtatcgccgaccatcgctcacccatccatcgcgtgtcttcctccagtacggattctctcagcaaaactactacaccgtcctcttcggtgtctcccgagctctcggtgtcaccgctcaggtgagttgccatcttcattctgtgcttctcgcctcgactctaaataccgactttctcccgtctcgcagctcatctgggaccgagctctcggtatgcccttggagcgacccaagtcgttctcgaccgaggccatcaagaagatgtttgccgacaaggcttaagctattcagtgacccgatgtcgaagacatgtacgcatgagaccatgtcatgctgatttaatagatcgacctccagggctggcgcagaacgcgacccggaaccagacgatgtgtacacgaacgggaccatgtcccgttcgtgtgatcgccagagcggtcttcatgatacagcatgtggaaggcgcagcgttgttcattctttccggtatagaagcaatcgatagtttgccggaggtgcagtaacgaatcttgaagcgtgcgggcggtggacctgtcatgcctgtcagctcatttcgtgatgacagcgagcgagaattatgcgggcgggtgaagttgtcggcggtgcgcggtccatcatcgacctgtcgagaagcctttcatcggaaaagggcacgtcccaggatgcccgccctatgatacacgtgggaggatatcgtcacaagtcacgtctcccgcctcggcgttctatctatcacgtgaaagcatcatccgcatacgccatggttggcggcgcaggcagatgctattcatgcattgtcgggtttcaccatcacatagctacctagcttctcgcatccttttttcaagttcaagtgaaccgctcacactcgtatcttcgaccagccaacactgtcaagaacaataccaagcgcaacgaattctgttccgacaacagcgagaccgcacatcatgggtcaggatcgtattcacgagtgactagagggcgcttccgcaccgaaaggcgaatctcagaaagaagactcggaagagggtgagcgtcgccgcagagcacaggatccgattaccttgattgcagtcaggttgataggactctgaatgacccagatacgaagttcgaggagccccgcgaatacgtttgggtcttgtccaggccaaagggattcaacgaatggcggagtaacggctcgagcaacagctccttaagatctcgagctgcccgtcaaagcatctgcacagggacgtccgcaccgatttgacttctcgagcaccggtgcgtatgtgatgcgaaacaactaacctgcaacggatgcataaaacggatgtacgagtataaacgtagtggaagtagccatcgacgcgtcgccctaacagagagctaccgagctaccgatcggtgatctatctctacgatctctacatgaccttgctagtgcgaagtggagagaacagcatagatgacatgagaggaaaacaagaaatgtactcgtacaagtgatgatgatgaggagagagtgagaatagctaggtatggacgcgcgtcgtgcgcaacgccagtcgcaacaaagtccccgcttgtaatttactatgtataaaagctctatatctatccattccttcgacttgcagctcatctatagtaccacccctagccaagctttccatagtgatgcatacatgcaccccacactgaacaacatctctttgatagatctgggttgcttcatatgcagggtctggagaaacacggatgtcaagtttggcctgctcgggtaggacatatcagagagcacgacttggtactgagtcggagtatcttaccagcatcctgctgatcgctcgggccatgcgccgatgatgcgcttccgattccggtaggctatcgtgaacggtgaggatctgccggatggattcccaaacaaacaggtaccaatgttccccagcaccagtctcgcgatatgtcggaacgaagaacttggtatgctgatgctgattgaccatctggaggaaatggctctgagagatccggcaggtcggcccaaggttccagtgatcccgttccaagcgctcggcttcagcccgcttggccattttcgaaaattctaccggcagacaaccacctatggagtaaaaacactacacacgtctccgaaaggcgagtgacgctttcggcacttctttatgcccacctgctagtcccgctttctcacgctgggttgctcggcatgcgtggtcaccgcgaacacgtattcgcccacaaagaacgttgaagtgatgatcgggtctcctggaatgtcctcatgaactattcttgttctaccgtatacgtcctttacttcccacatggcaacacaccaaaattccgtgacaacaatggctgctgtttgttgcccaagcaacggaatagccgattgacctctagcgatgggttcctttgcatccatatgaaaggtcaaccaagaatcgacctggatctatttcgaccactctgcggggtatgcagggctgtgttccggacgaaaaacatctctctttggcgcttttaaaggatagtaccgaatgttcgtgtaagtgaaggtgagatgggctacatcgcagatgatgctagtcacgttcgctcaccagcccccctgaccccaaaatcgtggtcttggaattgcagactcctttttcataaatttccgattgcgaggctaccttgatcccactcggagggcagatccggactagcaggtctttctcccgggacctaagcgaaggcataaggacatatgactccggcgccggcagtcggtatacagcatcgaggtgcagactgcttttcccatcttgaccgcgctccaagatcaagcggccgagatgagctgcagctacaggtccgacccgacacaacgccgcaagggctgctcccagcttatcgggctcagcaagtcgggtatatgtttactcgcaatgaggttgacctgcttgtatcatgcggcagataaggtcgaggaagaataccaagctaacgtcccgttcctgctcccgcgtctgcaacatgccatcctgcgtctcccctagaccggcttgctggatgagcatgtctagcactgcctccagaaagactgacatgacccatgctgagtcgctcgagctataagttcttatttcggccggaggtgcgtgttgaacaccgcaaagtagggccgcttcttcacgggtcggccagttgtcgttgagaatcgaggtgatcgctacgagccggtcgagattttgatgtcaaatagacgactgcatgattacacgttgtctatggacagtccaaggagtacgagctcttgatgctcgcttgagtcctttgtccgacgaacttgacagagtgatgattgaacagctcggcgatgattctggagacaaccaaaatgtgatatcctttacatgacacggctcacaaacgtaggttcgagctgtgctttaggagatgcgtggttgattggcttgctgcgcttcgtaagaacgactttgatagcgcagcgtctcacatacctttgcaccagtctcgcatatacagtggaaaggggatctacgcgggcttcgtatagttcaccatcattcagggagtgcgccaacgacttcctctttgaatcccgttgtatgtgttactagctgctcaatcgccgatgatctgctaagtagggctacttgttattatgatatcaaggatcacgtcttaggagcgactgaaacacagcacgaggaaggcagcaatagtcttgctgtcactgcttgaacaaccttgtcttggcacctaacttgacttgctgaccccgctatatgaccggcagaggctcgatcatctaaagccagacgatgatcttatccagcccggagaaacacggcagtatcgcgcgatatttccgtttactagattcaagtcgaccatctcccccagaaggaacttcatcttaactgcgcactcaggtctatgcgatagacgacccgggccatcaatgtcaagatcgaggacagaatattcagagatcattgttcagtaccgttccacaggacactgcattgatttgcatagcgcactcgagtcatgatgctaggactcactcgcggcgcggctcggaagcggcgaacccgcgttgctcaggctttcaggtcactcaatcatgtgtattgcgcaaacagaaacattcctcaacccagactgtccgtcagcgtgccaatgtctcggaatcttttggaagtgcgcaagcccgcacgctctcccgtgcaggttcacgattgctcatagctgaagctagatttcgctatcccctgaacgacggcgatcgagcgctgctcttggaagaccgaataaaatcgatcgaacaatatcgagtacctggagtccgaaactagtcgtctatggcattttggtaaagtttatcaggctgtcgtggaacatatcgctacctgccgggaacgtgaaacacctaacgccagagcgctcccaaaccggacatgggcttgctttgtaagtccgcgtttttgccaaactcacagctgccgaatcgtaaacaagtcgatctaagctcacatttcgcaacgagcaattgcgagcaacgagtaacccttcctgcctgttactcaccttgcaccttgtcatgttcgtcgaatattcggcttgagcttgtatcaccattgctttatcgacttggtatcatcataaccttccaaaattcggcagcacgcggcgagcgaatatcgacagaggacatacctgtggcttgagccagaactgcgacgatcatatctggctcaagatgaatccggaccaggaactctaccatatcctggaagctacacagcaggcagatcaggcggtccgaagcgacggggaaagtagcttgtcggcattcttagcccgaccaggtaagggctaagttgaacgtactgtgatacacactgatcactcacgggagaacccttgcctacgctcaccatgatccagatgctgggcttagcctgtgtcgcgttgccttgagccaggaggcggcgcgcccgatcagacagatgtctgctctagtcttgaagaaatacgtcaatcagtactggtctgccatcttcccccagtttattggccccatgaccggagcggatgtcaaagtgcaaatcaggactatgctgttgcaagctttaggggagcccgattccaagatccggatagccatcgcattcgcgctgagcagcattgccaattcggactggcccaacgactttcctgaactcttaccaggtctgtttgcgatcttgagcccagaggacgcgaacaaggaccagaacgctgtgcacggagccatgagagtcttggccgaattcgttcggtctgacattatggaagagcagctcttagacctgttgaaagaaagtatgcccgtgctactctcggtcctgagatcgccgcagaccaatttcagcactagaagtcattgtattaagatcttcaggaccagcagcaaaacgttgtactcgatgaaggacgaacacccggcagtagtgacccaggcaatggaggcggtcttgcctgcttggattgctgcacttggcgaagtcttgcagaaggacctaaacgacgagctgagccgggatactaactgggatgggatcaatatgaggaacgagatcttcagggtgagtatgggttcgaatcacacatcagcatgtcaacgctgaggactaatactttcattagactctgacagtcctgcagagctcgttccctcgtgtgcttcaaccgcatttagcttctttcacccagttgtccctctaccacttgacgacgctcgggccgcatctcaacgcatattatctgtcgacgtcagcttctgcaccggagccaccttcggatcccaatccagaggacggtcagaatgccggtattgtggatcttggagctagtatcctcgatttcttgaccggcatcagtcgcgcaagaagtcttcgtagtatactggtcacgagaaacgagagcgctggctcaagcaacggctcaggtgcagccatgagccgagagcagcccacgccaatccttgagggccttgtacacgaagtcgttggatggacgagaatcacgagagaagacgtaagccacacacctgtcgaggagttcgatttagagttgaccccaatccaatcgcgataccggagataggctgaggtttgggcagacgaccctaatgctttcgtcgcagatgaagacgacgaggccgatgcgtacagtttgagaaccgctggcttcgatttactgggggtatgttgctgcatgcaaagtaaaaatcgatgatactggctcacgtgcgtttcatcagtcgttattggataagtttcagtctacagtcgccagggtgctgcaggcaagttaccgacgacggatggaagagtcaaaccagctgcatcaaagcggtgacgcagattggtgagctctcttgctccatatcgaatgacctcgtcaggccactgaaatgatgcatatcaggtggaagcctctagaggctgccctagcttgtgtgggttccgttgccgatgctctgctcgacatgcgagacgaagagagtgacgagggtgtcgccgagagctttgatctcgagaatctcttcaaggaggtcgtaccaaacttgctaaattcttcaggtagggggcctggagaacaaagcctagaaggtagcgcattgaccgagttatttttgaatcgctgcagattcgccattcctacaaggtcgagcattcgtctttgcgagccaatacgtgttgacgttggcagagacgggcatcagcgggcaataccttgaggctgctgtacaagcgctggaggcgcctggtgtagagagcgtggtgaagatctcggctatcaagactatccgaaagtgagcaagagcggaagttcacctttgccgtgtgcaacgtcctgatctttttcaatgacacagcttctgccgctacatcaagccagaggaaattcagcctctttcactgagaatcatcggcgatctcggtccctatcttgcagaggccacagaagagacgcttgctctcgtgctggagacgattcgagctgttatcggcgtagatggtagcatcctggacgcgaacagtacgcagcaaatagtgcaagccatcttgcaggtctggggtaccaacgctagaggtaggcatcaccttctgggcagtagaacgaggaccagactaaccaaagcgtctcaccagacccagtattgaccgctattgtggaggaagtgttcgagacgattgcgtcaacgccatcgcaaggcgtatatgatagtctaattgcgaccgctatgccgccgctctcggacatccttacaaggcccccttcaccagaagacatgtcctcgacatcggtcgcagtggagcttgtgaatgctatcatgcggggtcgcaagactgatcttggggatcggcttggaccaagcgtttggcctgctctcttccactgcatgctgaccacggaagacagcgatgccgtccaggtatgagctagtttacgtcaccttgtggccgcctgatactgatccaaaagtcttggtgtgcagtatggctgcaatgcgctaacaacatttgtgcgaaaatccggccctcaattattcgcttggtgagaagtggtagagcgctgcccactaatccggttcatcgctcatccgcgcttctaccccgctgtccacaggcaagatgcgacagggagatcgggacttgatgctatcttgacagtcttggcgcgcctgatcgacccctccttctccgaatcggcagggctatgtgtaggagacttggtcttgcatctgcttcgtaacgccgggcaacatctcaccaagaccgtaccaagcttgttggatgctctggccaggaggatagcagtagctcaaagcactatcttcacccaggtgggcatcccgatcgctctagcaatcagagattcgaatccgtttatccacgctgacaacctttcaaaatattgcagacgctttgcctaccctttgcctatcttctcacagtcgagctagagctgacgcttgatctgctcgaggctatgactatcgcaccctcggctcaacaaacgaatggccaagcaaggtccggcctagaagttgtgctgtgcgcctggtgcaacgacgccgtggacacagtgcaaggaagttacagtatccgcgtcaagtgagaaccgggtggacatatgaccctattagcgggatagctgatccagctacctacacagcgacatggccatgtcgaacctgctcgcctgcgagagaccgtctgtgcgtgcattgatcgtgaagggagacatgattgtcgacgaagagaaccgaaatagtgagtcgaacgctcaacagcttgcaaacggggttgccgactgatgattgccaaaccgtgttcgttcagccatcatgacccgatcacggacgcgtaacagtgagagatgggatgggccaagtatgcgaacccgttgttaacggcgcccaatttcctgcagatcctcacaagttcgagatgattcctcttcaccaacgggctttgaaatatctgttggctcagctgcagaacacagagatcgccgaggccgagaacgcgcaagacgtcgacattgctccagacgacggagatgacgattgggaggaggaagacgaccttaccaaaaacgaaaaggatgagatggcttggcttagcggtaaagacgttgtcccaggatgcggcgttgcatgaagtggctgaccctcttaccgctaatgcagatatgctcggcggaggaggtggtggttgggacgatttcgaaaacgacctcgatgggcaagacaatgacgaggatctcatgggcgaccagatcatgcaggtcgatatggctgtaagtttttggttccgagaccttgcctagccaattcatgaactgaaggcattctcgttgtcccagaatcatatcacttcagtagtacgtcaagcgtacgttaggaacgcgaatgacgtgcaggaattgtgcaatcgcctcacggacattgagaaagctgtcatgagtcgcaaggtcctttcgatgtaaacaattctacatccagcccgatttgagcatgatcatgacgatacattcggtcatactttgcaagcgccgctcgggtggttgtgaagcttatctgataatgcggccgaagtcatcgttcccgaattcatttcgaacgcgaatcgccatttcagcgacgtggtcagagcaagacgcgtcacgcgatcgaatcgattgttgtgtttgtcgagattgactttatcaagtaatgctcgcacagagatgaaggtatcgtcgggtgacgggtcatccgactggttcttcagacagggttctttctcgatgcatagtgaagaggtgagagcaaagcgtacggtatttgaatttccattcgaaactcgtaggtgtgcagtctatgatctcgaaagatttgcctagaggctagaggatcgaatttcacctgtatttgttgtacatgacgtgtcattcgttcattcgcgtcaaccccccactttacagacaacaaacgcgcgtgcgcaaagacgcgttcatcttaaagtgggcaggacgcgccaactataagaagggcatcgatcgcgcgccagcaatttccttttcctctcccccgctccgatccgcccactcatcattaatcccgttcaaacatcaatctcgaatcgattcattcaccttcacatcttcccctcatcaccacatcgatttcacctgaaggtctcattccacttgctaatacctacaatcacgatgtctaccgacttcgaaacccccagcaagcccctggccaacggcctttccggtatcgagctcacgaccggatcgaaaacctcctccgccgctttgaacgcaaagttgcaggcctccgctgaggacaccaagattaccaaacccgagaacaccgagactgaggccgctgagcccgtcgacgaaaaggtcgccgctatcgaagctcaggctttggaggattccaggaagaagtttgtcggcgaggtcgatcttcccgaaagcgaggaacccttgttgaaggaatccaagagccgattcgtcttgttccccatcaaataccgagaggtcagtctttggaaggatgtcatccgaatcgtcactcgctgacttgcatcctgccttttttgcgatcgctttcgttcgcctatagatctggcaaatgtacaaaaaggctgaagcttccttctggacggccgaggagatcaaccttgctatggactgccacgactgggagaacaagttgaatgacaacgagcgatactttatcgagcacgtcttggctttctttgccgcagtaagccagcataggactgcctgcagcctgccacagccgttcaacaactcattcgtgattcttgctttgcttgattagtctgacggcattgtgaacgagaacttggtcgagcgattcagttccgaggtccagtgcgccgaggccaaattcttttacggtttccagatcatgatgtatgtcaggctccgtgatcgttgtgctctagctctcaaactgatacatccggtcctatttgccaccacctcattgctagggagaacatccattccgagacctactcgctattgatcgacacctatattaaggaccctgcccgcaggacttacctcttcgacgccattgacaccagtgagttcttgttcctactcttgctgttgcgatctcccccgacatctagcttatgttgtgcattgcccttgcagttccttgtatcgccaaaaaggctgattgggctttgaagtggatctctgaccgacgcagcacctttgctgagcgtttgattgcgtttgccgccgtcgagggaatctttttctcgggatctttcgtaagtgtcgttacatcgaagctcggatttgttctgccattgacttgatgaattctctgcatcataggcatctatcttctggctcaagaagcgaggtctcatgcccggtcttaccttttcgaacgagttgatctcgcgagatgagggtttgcacaccgactttgcttgcttgctcttcactcacttgtaagtcgcgcattccgtctgctacagattcccgttctcagcacttacgtcggtgcgattcataggaaacgccgtcctcacccagagaccgtcgagaagatcattcgagaggccgtcgagctcgagtgcgagtttttgaccgacgctctgcccgtgtccctcatcggcatgaacgagaagttgatgtgccaatacatccgtttcgttgccggtaagtctggctcagaggaagaatcggcgtacgcagtctttgctcactcggcctcctgctctattatagaccgattgctcgtggctctcggaaacgaaaaggtgtacaacgacaccaaccccttcgacttcatggagatgatctcgctccagggcaaggccaacttctttgaatcgcgagtatctgcatactcgaagagttcggtgaaccagagcatcgacgccgaccactcggcagtcaagaagggcttcaccatggatgacgacttctagtcgactcgcgccaccttgccgcttcgttcaccgatggcgggtttcctatgtctcgccataccctactcccttccgcttttaatcactagacaatcgttgtgcaccagatcatactcattcaaatagctcaatcttgtatccaatctcttgtacgactttggccctttcggcggtctacatgtgtacaactatcaaaacatacagctctctcaccacgtatatcagctcgacctggcattgagcaagcgaatcgcacgctttccttccttttctccggtctcgacagctccggtgacactacctctgttgttgagactggtatgctccccggcaaagagtaatttgccttgccactcgggcttgccgagttccacatagttgagcggagtagcatctcctgtgggtggcgtcgaagtggcccccagcgcgtagggatcactcgaccacgaagtcgattcagacacaatcggcggttttggcttcgcatcggcgcttttcggtagattctccaggaagatcgcatggatcgcggctgtgacttggtcaaggggcattgactcgagttgcactgccactggtgctggtagatatgtgagcaaggtcggatgagggtgggaagacgtctgaacggcaaatgaagcgacgacaagagaaaccgactcgagtaaagcacgcggatcgtccgccagtgcctccttgtcgggagccgagatgatgggcaggattgtgaatgccccgacatctgtgggccaccaggccttttcgtaagacaagacgattttgccgagttggccgacgtgagtaccttcaatggcgatctttttcttctcagatagtgtgggttcgaaaaggtccgcttgcgatctttgcaagacggcgagcggaatagtgcagatgaccaaacggcccgagagctcgttttgaccagcttcggtgatggaagtgtgaatgttgatgctatcggtcgacggcacaaaggccatcttgcgaacctcttcgccggtcctgatctccccaccgagaccggtaaagctccgagctagtgcatcgatcacttttgaatagccgccttcgggtcctgcatcagtgcctttgaagctatcttcgtatccattccatcgcagggagaattgttccaacgatgctcccatgccgacctcgagcgtcctggtgagcccctcgacatgacgctgttcttcatcggaaagcgagtcgaagagacctgcggcgtcttgtgccgagaaaaggaacgccccaagggatccagtgtttgtagatttggatgctgcttccaacgctctggactggttcgcctgcagcttggacacgacagaggggtccaagacctctacggatgagggaaacattgcgtcaatttcccaacattctgtaatggaatacctttgactcactgcccgcggctatgaccatcgaccgtgccttggtaggtactgtggctttctgagcatatcggagatctggcactcagtacgggtctttacgggtcaagccaaggattgcttacaattcccaattcttctacaagatccctgacgggagttccttctgcatacccgtgaatccaggagcatcccaagtcgaccggggctggaaaccccttgcttgtatagcatcgtcctcccaatcgattctgagcctacaagaatgataggcatcaggtcactgctttaacctactgtccttgccgctgatggatcagactggactgacttcgagcaggatgacctttttgttggcctgtgcgagcgttcgagccgcgacgaggccagcgaaaccagacccgatgatgatggcgtcgtacatgttgcctatgagatggaactagagggaagctcgatctagactagtcagggactgtgttcgtcaagtttatagacgatacgaggtcggatgagagaggtttgatgaaccaagtcgcgcaagtcgagagatgttgaaaggtgcggcggagtcgttgtgcttccggaccggtacgagagttcggggacccgacgacctgtttgatgagttgtggctcgtcgtggtgattgtcgcgtgctgtgatgagttaaaaaagccacgtcggcaaataatcaactgtcgtgatcgtgatcgtgtcgtgatcgtgcgaacatcattgatcattgatgcgtggttgcagttgcctgctgattcgactttagcgccatcaaatccgctgccgcgcgcacgccatgccatcaacatgccgcttgtgcccaccgccgccctgcttggccactcttctctctcctgtcgccccctccccgctcgaccccgagtcgctcgctcatcccgggtcaaaagtctactcgacatccacctgttagaccgtatcgataaaacacgaaatcatgtcatcgcccccacttcgtagactaggatccaaaaagacgacggcaagagtcatcgggagaggaacaacctcggcgttgggcgagtccaaccgaccatacgcttcgatcggacatcgcctttcttcctcgtctgcatcatcaccagcacccgacgcaaccggtccagacggacgaccgaggaattacctcttgcatcaattacactcgcagcgggatcggcattcgacccggacatacctgaggggatcgaagcgacaaaagcgtgagcgaaggggatcgtctagctcttcgggaagctcttgtatcgtcttgcacgccaacccagcgcaagtcggtcggctcaggccggcgacagggttcggtagcgaaatcgacatggtcggtcaacccgtttcatcgaccgcgactgagcaacgaccgaaatccaaggatgaggaagggatagatgaagatactgatactcaggccgaaatagaggtcgatagcaagcccaaggcgcctcggggtcgacctcgtggacggggaagagggagaggcaggggcagaggtagaggaaggggtcgcgggacgactacggcctcaacggataggctctcaacacccgaaacgaggccatcgttgcgctcaaagagaccgatcaacaacagacctgagcctctcgtcctggcagctagcggtagcacccctacgacgaaatcgctttactatgaaggttctacggacgaggacgaggtagaggatcacgaggtcatggtggatgagaatagcaaaccggcgacacccaacgggaagaacagcaaagggtcccagaggccgtatcgacctcgtcagaacgaagtgccagcgcagtatatcaacacgttcacgacggcattggactttcccaaggcgctccatgcgacgaacggtggcgatgcgacggatcaagctggcgcgacgactgcagagtcggcgaggtctcgatctcagagacagtccaaggttgacgccatgggcaagatggaccagaagacgccgggtgatgcgtcggtcgcggccgtgtcgggactgtccaacggtcagcccataccgcctaccgcaggcgcactatctaccggaatctctctcttacctcccatggccaatcccgccaacgggcactcttcctctgacgcacccaatcccgctgccgaacccaatcccaacaacaaccctttgatgaagaaactcttggtacaacctgcacccaaattgcagaaatccagtgtcaagtggtcaggccctcggaaacccagagaccgttcgggggagaggctgttcggtctgaaagagtgtcctaccttctatccgacaaaagaagagttccgggatgccatgggatacatccggaaaatcggagagaaaggacaaggccaggactggggaatggtcaagattgtccctcccgaggactggaagatgactttcgccttgaacagtgaggtgagatccgcgagtgtgtcgtacgcacacatgtggaacataaagctcaacgctatatccttccatgacagacgttccgatttcaaaccagacttcaaagattgaactcgctcgaagccacgtcacgggccaagttcaactttctggaccagctttacatgtttcataaacagcagggcaacccggacgtagttatccctgtcattgatcatagaccgttggacgtttgggcattgcggaaagaggtcgctgctcaaggcggtgcagataccgtgagcggccgactggcttgtcgagagcattcgatgaacaattcctcattcatgtttggcttgctccacagatcacggttaacaaggcatggggaagtgtggcacgggcaatgtcatacactcaagcacatgcgcctcatatcaaaagcgcctacgtcaagattgtccagcctttcgaccagttctatgagcgggtcaaaggcgcaccgctagccaccgtcattggggatcttaagactgagggtgagctctggctactggctttaatcactttgataccgcgttaacccgaccctttctcaaagagggcaaggggcatcctgaggctgatgagatgaaggccgacgacgcagagacacgtgccggttcggtctcggtttcccctcctggttcggagaagaagcgatcactccgtaacgctgctcggacggcaacctccctcacgtcctcagcactcggtcggggtatcaaagcggacgacgctacgagcaacggcggacggaccgctaccaccctttcaccgaagggaaagtccagagtttcgacgagtcgtgcacagagcgtatccacagtaatgagcgatctagatgacgaggagggcgatgtcgctgaggtcgagacgcacgacgtggaagatctcaaggacggcacgcgggatgtgacgcccgcccggggcacgaagaggaagcgcagggctggccggggcgacatcaatgttacccctatcaaacgatctacgcgcaataagagtcggaaggacgtccactacgaaaagggagatatctgcgagatttgcatgctcggcaaggatgcggccaagatcttgctttgcgacgagtgtgagcgtgggtttcacatttactgcctgaatccgcctctctcttctatcccggatatcgatgagtggtactgcccaacatgtctactgagcaccggacatgattacggtttcgacgaaggagaagagcattcgctgcactcgtttcaagaacgggcgaacgcattcaaaacggactggttcaccaagcatcctccacactccagcacctctggagaccaattgccacgacgcgaagacgggacggtcgatgcagacatggttggaagccactacgtcacggaagatgatatcgagaggcagttctggtacttggtcgaatcccaatacacctcggttgaggtcgaatatggtgccgacatacactccacaacacatggaagcgctgcacctacactcgagacacacccctttgactgttacgctgccgatccttggaaccttaacaacctgccaatcttgccgcaatctttgttacgatacatcaagtctgatatttcgggcatgactgtcccctggacgtatatcggaatgctcttctcaacgttttgctggcacaacgaagaccatcacacctacagcattaactatcagcactttggggacaccaaaacatggtacaccattcctggttctgctgcggaaaagtttgaagaggcgatccgcaaagaggctccggagcttttcgatcagcagccatctctgctctatcagttggtaacgcttctcaatccgggcagattaaaggagcttggggtgggtgtcaatgtctgtgatcagcggccgaacgaatttgtgatcacctggccaaaggcgtatcactgtggtttcaaccatggtttcaatctcaacgaggccgtcaactttgcgttgccggattggctgtccttcggtgccaattgcgtgcaacgttatcagatctctagcaaagctcccgtcttctcacatgaagagctcttgattgctatcagccagtattctgacacggttgagtctgcagtttggtaagtttgccttcaacgacgtcaaggtcttttcgtcggaactgatccgccttgccgcgtatcataggattgaagagggtttatctaccatgattgttcgtgagctcgaaaaacgggatcaagtgagacggacggatgtaggcatcggtgaaatcctagactccaccgacaagtcagaagaacagtacatgtgcttcaaatgcaaagccttttgctacttgtcgcaagttatttgctcgtgtacgcgtcaagtggcctgcttggaacacggaccagagctttgtaaatgcgactcggccagtcgcacactgcgcaagagattctctgaaagccagctcgtcgacatacaacgggcagtctcggaacgagcttcgataccacagacttggagaacccgcttcgaaagcacattggccgagtccgcaaggccgagcgtcaaagccctccgcgcactcgttgccgaaggcgaaaagatagctcatcctatgcccgagttgtctactctacgaggcttcgttgcgcagatcaattcgtggatgattcgggccggcgccatgctcaaccgcaaaaaagccagtggaagaaagcgaattcgcaaagcccgcgacagcgatgacgattacatgatggatgttgatgaagatccccttggagagatcagcaaaaggcccgcagaagaagtgatcaaacagctcttggtgacggccgaaaaaatggcttttgatacccccgagatcctgcaactgcgcaacttggttcaatcgatcggtgtcttccgccgcgaagcttctacgcttttgaacacattggagcaggaccttgatatgaaagcctgtaatgccatgttcatgacgggagaagcgctcaatgtggacacaccggaactccatcaactcgacctgattcttcgccgcaaagagtggctcgatacgatgaacagccttgatgaggagttcctggaattgaccgacgtggagaactacctggagcaagccgaagactgcgagatcccgggcgaccacgaatttgtacggtacctcaaggtcaaactcaccaaagggactgcttggcgtcgtagggccgagatcgttgtcgcagcctgtagcgagcccgaaaacaacgagcggaacatcacactcgatgagttgatggccctgacaaattatgacgacgacgtgcccgtgaacgagaagctggcctccaagctagccgagctcagaagaaagacagaaggcgtgattcagtcctgcaaatcagttctcaatgccagctcagaggaaaagaagaacatgtcgcacatccgtaaacttctcaagacagctgatacaaaggcaccaggtgtcattatacccgagttggaaatggtcgaagccatcgtcactcaacaagatgattggttcaaacgcgtaggcaaacttgtgggcgaaaccagacaacccagtctcggtatcgaaaggttgattgaacagacacggcaactactcgatccagaggacgattgtttccctgttgagaccaatggtctcatggagcaagatggcatgtcggttgcagtctcgcgcttcaactgcgtctgccgacaaccagcaaaggcaaagatgtatcagtgcaggaagtgcttggagctctaccatcttggctgcatcagctctacgtatctcgaagagcccaacactcggatcatcaagtgccccttctgccggacaaaggatcaaaccgggcagaaacctcaacctcgcccgtctctgttgaagttcatgccgttgctggacgcgaacgcgtggaagctgggctacgagtttgaggaactcggtcagattcgagatctggtagccctttgcaagcatattggtgatcttgttcttgtccgcaacgagacatacccttcacgtagggagattcggaccgaggataccagattccttcgacactggctacgcaaattacgtgacttgccaatcaacatcgagattgaaaccgaacctgcaaacgtgtctctttacccagctcttctgagccgcctgaaacaagtcagaagagcacgggcacaagcccttgtgaagcctgccgacggtgcgcagcgacgtctttccaccaacacggtgagcggaggccagcgcagactgagctcgaacatacccgaagcggaagctcctctgaagatcaccaagcggcctacaggcaaggatgctttggaggtcgcgaggaggcgtcatcgatggccatggatgttcttccaggagccagagacactgcagaagggcgcgccggcctgcatatgtcgagggaagaacccacacggtcattccaacgtagacaacaaagaatgcgccatgtgccaggacgttttccatcatcgatgcgtttccaacgtgcacgatgatgctgttgatcgcaccaatagtccggattgggtgtgccctcgctgcatcgtaaatctcagcatcgattgggttcatcgaccaaaacccgtctgcgttctcacccacggtaagagtttcacagaaaaactgacccaccgaatctacctacttactctcttcccctcgcataagcagaactgatccgctcaaacgagaagaagccgctgttccgccacgagcaagcgggctctagcaagagggaggatacctggaagatgcgcgtcgatatccatgcgaccttgcgggagagcacaatccaactcgaacgaatgatcgtcgattcgtcggggccgcccatccatcttatcatggaacggttcgagccggggatcaaggaggaacgaggcaggggtaagcgtgattacgctacgtgtgcacattccgatatactcactcggaccttctgcttgcttgcggtagattggggcaagaaagcagccgtgatcgttcgtgatattcggcaggaattgacacaggcgtgggaagccagtctcagaaccaggacgatcaacgatgttggtcctggccacgccgacggaccggacggttcgcttcaaagcatgaattcggctggtccgtcgatgaagtcgcgcccatatgacaaggatcagccgagatacctcccacccggaccctatcatccgtcgcctaatatgccaacacatatgcccggcgcaaatcctcagggctactacacgtacggagctccctactattctacacacatgcacggccacggcgtgccaccgggcggtccataccaacagccagcgcctacatacaaccctttaggcatgccatacaacggaggctgggccgcacctgcgccgcctatcgctcctccacctctacccgcgacaaccttcggaaagccggcggaaacaaaggcgagcgtaccggccgagcgagtcaagactccgcccgtcttgccccctccccgcccattgaactcgttcacggccaacatggtcattccagcgttcaagggcggaagcacgaaaaagccgacggactcggtacccagccattcatcttatgccgctttcaaaaatgccagtcccgcgctgagcgctttcgctaaaggtcctgcgaaacccaccccgccaccgccgggtccgagcgagaggcggccctgataataatttctctcaacttgccgtcgagcggttcattgtctattgtgctatgtattgttgtatcactgcttggtagctgttcccaaacactagctgccatttatgccttcccagaatccattggcaggtatgccaaggtaatggcgtttcacgtcacgtgattgcccctcgggcggcagattcccggtgaaaccaagattccactcaaaccgagcttccaacacgtcatccgaaaagtcggtactgtatactgtatgtggatacaacaatctggatacatgaacgacgagccagaccctgatcaaaggactagtctcggtacttgtttcccgcctcctttattgatctaaaaactctgcggtcttcctcgaactacgaaacattagttgatcttctcgcccctcgtcttcgttcaagactcaaagccacaggcaggactccccatccagattcccgaccacgacgacccagactcgccaacatgcactttctagtcactggagcttcaggtctcgttggaggccgaacggtcgactacatcttgatgcaaggtggtcataccgttctggctacggatgtgcggcctagaccggacgacgcccagcctctacctgctgggagccaattcttccaggccgatctgacctcgatcaaagaggttgacgccctgtatgatgccaccgaacgtctcatcgatggggtcatccatatgggtgctattcccaacccgatcgatattgatgcccgggtgtgccacaacgtcaatgttaccgccgggtacaacatgatgtataccgcggccagtcgaggagtcaaaagaatcgtacaggcttccagtgtaaatgcgacgggattgtcgtactctgatagcgaacgacgagccaagaactttagggacatggatttcgggctgccattgaaggaggacgagacacctttcctgccagaggatgcttacagtgagtcttgcctcgatgtttatgagagccgatgagctgtattgtttgtttgaccatctggttctcgatcttataggtctctcaaaatagtgagctgccctgacattgcgaaattcgcttatagaagctgattagcctcttgatcctgtattcagtatttcggaggttcagtcagatgctctctgtaggctgttcccatcgcttcgaatcgcgtccatgcgtttccaccacgtatgcgacgagaagtttgcagtcgaacgagccacccaccgcgatttctggagttggaccgagacggaggcagcagcgcgagcgtgttacctcggtatcacggccgaagaagagggcttcaagcgaggccatgaagcgttcttcatcacttgcgatcacctcaacatcggtgacgcgatgaaggagctgtcttacgatcggggcaagccggaaggcgagacgcaggtctacgcaaagctgaaggagcggaagctcgaccagatcgggaccaaggatctggtggaagccgcctatgcaggggtcaagatcaaggacggctggctggtcgagcccaacgacagacggggtttattcgataacagcaaagccgccagactcctcggctggaagcatgatgtataaagagaggtcgaaccgtgtgattctagcctctgtttgaatgtagcaactatttgtatagtcatcatttgggttaatcagatcataggctttgacccgctccctcggacatgaacatgttttattcgctcgagacgtctcccacgtgtttcatgtccgcatatctcaactcgccggccgaagtaagagagcagcccgcttcacccatcacccacagcttccacggagttgctcgaatgatcactaatcgttcatccgatcgactcgcaatcaatatgaccctggcgacagctcttgtcctccaacctaggcagtatcgacctctgtgatctaggatacacgcaatgagtgtagcgaatgccgacgaagctagaaaggcactgaagctcgctcggaactacctcgaaaagggatcctacaccgtcgcgctcaaatgggctcgcaagtcatccagcttgtcgccctcgaccgaggcggcagaccttacagcatctatagaaaaagagatagctggaggtgctacttctaaggatgctacctcctcagcgactaaggcaacgggagcagagacgcatcctagtgcgagcggagcgcatcagcgaccgggacatggttcggcgagtgcggccaacacttcgacttcgacgacggctgctgggggggatgcgaaaacgaggtcgttcactccagagcagaccaaggtagtgaaaagggtgatcgcttgcaaagcgtacgagtattactcgatcttggcaggtgagcttgatatcgtaatcatgttgcctgcgaatgccctttgatggacgaccgactctgtagtcgagaagagctgctctgagagtgaagtacgcaaagcttatcgcaaggtcagtccagacgacaatgtgcgcaaagtagagatagtcgctcacgtatcgtgtgccctatatagctggccctggcattacaccctgataagaagtaggtacatcgcgatgcttcacgggaagcgctgagctcattgccctccgttttgttgtcttgcttctcagcggtgcaccgagagccgatgaggccttcaaaagttagtcaaagtgttccaacccttgcgactggtatcggatcttgctgatacagctcttctaccttgctgcagtggtctcgaaagcatttcaagttctgtcagacacgaatttgcgagcggcgtacgactcgaacccgcaccaagatccctccagtcgagggggtggaggtggaggcggacctggaatggcgacgagaggtttcggcggcggtcaacaagggttccaatccgaagtctctccagaggacctgttccgagcgttctttggtggtggagggtttgaccagtttggcggaggtcagggattcggtggaccaggtaagtcacaacttgtaggcctatcgaatcgtaatactgacgctgatgaggtcgaaatcttgccagtcttcacttttggcggaccagcagggtttcgccaattcgggggcaacactgggatgcatgctcgagcacgcgacaatcgacgggaatcgccaccacccaactgggttcagatgctgcctctgctcttcttggtgttcatcgggcttctctcttggctacctggcatgttcacgacagcagatcctggctatcagtggaaatcgacgtcgccgtggacattgcacaaacagacgagcagcatcaatgtggattactacgtgaatccgcgggagtggcagcgacatcctatctacgagagtattccagtggaaaaaaggggacaggagcaagctggcgcatacagcaacaaactgaagcggtttgaatccggaattgaacagcattacgtctcgacgttgcgacgacaggttcgtagaggttgatcaataggcaagcgtgcatggtcgcgtgaaggctgatgagtgcaaacacgatggacagtgcggcaatgagcaagaggacaggcgggatcggatagacaggagtcgaggcgtctttgggtttggcgcggattgggaaaagattgcgcagattcaaaacgaaaagctaccgagttgcgaaaagttgaggaaactcgagagcaaatattctggtggtcggactttgtatcattgatatctagacagcattaccatcagacaacgtacatgtgagcaccactggaaactaggggagatcaacgcttcgtatcgaatctggccactgctgcgtgcgagggggtatatagatacaggtaaggctcgtgaagggttctttcatgttatcgcttgtgatgcgattgggcggaagaaaaggaaatcgaattgcagacttgggggccgtgatcgggtgtatgtgtatgctgcgagattgcacgtagtcctcctactcttcaggctcctcttcttcggtaatgtctgccggccgatttgtcggcatgacgcctcgaccgcgtgccctgttgtccgctggctgttccatgaccgagccagaggttgaagacgaggaagatgaagatgacttttgcttgggttcggccgttttcgagctggagccacctcgagtcgacccccgagaaaaggccatgggcatcgacgagaacgaccccgagcttttttgcagcggcgagtcgtgatacgtggcgcccccggcatggctcgagctggtggagcactggccgagaccgcccgcaaacatccccgcttcttcttcgtcgctcgtccagtcttcttccccagggccgtccacgcccttgcctctgtcagcaaagacatctcggatcggcggcagcggtcgcggcttccccatatgtgcgagaatgaattgacttgacaagggtgaacgggtccgcttagcaatgagctgcgtcgggtttgcaagtctgtcttccacagagcgtttacgccaagcgtgaacgaacatgtcgtcagactcgtactcatttccactttcgccgttgcgatcctcgggcatgccagacgagcgtcgagatgattcgcccgaacgattagaagcgttggtagccgtcgaggctgatcggtgatgaggtccacttcgcgcccgtgaccgagctgaagacacagaagcgttgcgatagtgcgaagcacgaccgccgggacttcgcgtcggtgtccgcgatccggtggagcttatggaatgagccttgccgtgtagtgctcgctgtgatgccgacccatgcagcttcatcgaccgtaccgaggttggccgagagctagtgccgaagtcaccgaattcgctggtcggtgtgcgactgcctgtcgaacgcctactgctctgcctgcgcaacagagtatacggatccataggcgaacctgctggcagatccatgagcggcaaatgcagcgaagtcacggaagatctacgagaattgacactgctcgatcgccttgagcctatgtgcggacgggtctcggcaggtgagcgtcgctgcaccacagtcgtccgtttgaccacatgcatatgttgcgatcgcaggcttggggtatggttgatgccgtgatgatgtatgacaggattgggtccattgttgcgtttgcgcttcttgcgatcttcgttccaccacgatcggaaagtcatcagcagactttcgcgcttgccgttcttgggccctttgctgctggctgaaggagagtcatcgagggaaattgtactggccgagatcgtcccgtaagaagaggagttaggaataccgagtccggtactcggccctggtacatcatgtgcttcgactgaggccgtctgagacgtatcaccaagactgtccttacgacgtcctagaggcggggtcttgatcaatttggtaggagatcgtttcacatcagtggcatctttgctggaaacctcatcgagaagcttttcttccgacttctttcggacaagaccggtcgacaacgcagaggtcgcacgttgaagcatcgatatggaagacgaccggaccttgccggcttcacttcgacggcttggactacctggacttgagactgtcgcggtcggctcgtctgccggtttgagcggctccgttccgttcggagcgagaggagggctattaccaggagcctgatgacccatgctagttggaaccgacctggatgatcccgatcgttcagaatcattgcttgtcgccgactgttgagtcagatgactaggtaaacccaatgtcgttacggctttgttctcggtcgcgagcgagggccgcctagcatcggtggacgaccggatcggcggtcccaattcgatgtttttcatctgtgccacgtgactgggggacacggacgatctggccggctcactgttgaacacgtcggccgtcgaactctgctggggctgttgaacttgtcgctctcccgatggtagtgatgcaggaggagccgttgcgggtcgggggggctgttcgacctcgctgacgaccggtagaccttccagctgatacctctcgtactcttccttctgctgttgtttcgctctcagcatccaccacattgccgcgctggaatcgcaagcgtcgctcgtgacactatgcttcaactgtccaacatcgaaaccgagcagctcgaggctgcttagcagttctttttcgtcgacgctcgaaaagaagactggggatgcctcggtcaactgctcgagataatcgacgatgggcaaggcagccgttgaaaaggagttgctatggaacatggacggacgacattccgaggcgacgctcgaagagacggatcgtcgcttcgtcctggcgggcgtcctgctatggaccgccatgtggtacccgtgctcgtcgaaactgatagccgaatgccgcctcgaatctagaccgtcggagccgccgtgctcttcctcttcaagttgcttttccagtatgtgcacgctaggctttgcaaacgtgacgctgggcgcgggtgatttcttgatggtcgattgactctcgttggaatgcaggtagacgtcgctagcggcatccgaagggaagcccgcactcatgctcttggtcgtgtcaaaagcatcggctgcttcatcaccctcggccgttgtgggtgccgtggtagagcttgtgctcgtatgtcccgcatcggacgaagtcctcgtctcggctgacgtgtccgagacgtccccctcggcgtccaacaagctcttcgggatggcctcgttggccaacttgctcgtcgagtacttgtgtccctgcagattgttagtcgcgcctgctccgggcgtgatcgggcccagcttgggtgaactgagaggcgataggccgaactggctgccggtatcgagtcggtgttgtgctgtttgagtcacgggagtcgtcaacgattctgaaaaataggacgtcatctcggccgtgttcgtctcgggcgtattcaagaacggtgtcaccgcgccggcacccgattgcccgttttgcatgttctcggtcggaaggtcgacgatgcgtttcttgaaccaggggtgggagaggatcccttcgatcgaaagcctggaggtcggttcaagcttgaggatacccttgatcaggtccttagcctctgcatgtcggctcgcgatcaatccatgtccattgtgagaataaacgaatgacgggctcaccatcgctcagccattcgggctcttcgtaatctcccttgacgatgagcgacttcatcgtctcttcatcgtcatcatcgaatggcaatccgccgcataagagggtgtataagatgatccccaaggaccatatatcggcctctgaagacccaagcgaccatcagccgctggcgcagagtcgccccgaattcgagccgactcaccttctccggcatacttgagcccctgtaacatttcgggcgaagcgtaacccgtggtcccgcaaaaggtctctagcagcttgctccccctggaccattccctcgcgaacccgaggtcacccagcttgaccccgcaaaacccgttgagaaagacgttttccaacttcaaatcccgatggaccgtgccctttcgatggatcgttcctacagccacggtcagttctccgaatatcctcctcgcttcgccctccaacaacctgccgcgttcgacgagatagtcgaacagttccccgccggtgcacagctccgatacgagccagatgtgggactcggtggcgatgatctcgtacagctggaggatatgacgatggtgcaacgatcgatgatgatggatctcccgagtgagttggcccgtcatgtttttaggaatctttttgatcgcacatcgggtaccggtcagacggtgcgtggcgatatagacggcaccgtatgatcctgcgagagagggaatgcagtatcacacatcgcatcctcagccatctggaccacttcgagcgtcctcttggtaagcgagacgagacccaccttccccgatgacccggcccagagtataacccccgacgaccttcaacttttcacttcccagctcctttcccaattcttgatacgcattcgccaactgtcatcgagaggacgtagggtcagcgagccacctaaccccgctcgtaaggaagaggatttgaacgctcacctgagctctctgattgatctgtgccgagttggtccgattatgcgtcggcgcgcccgtccgtcgatgggcggccatatttcagagcacacggtgctgcacgttccggactctatcaagccggacgtacgtagttcacttcgtcactttggccgctcgtcgctcttgtggtcggcgttgacgttatggagtatgccgcttccttgcgaatagacgtattctccccctgaatctaattccacgttcctctatgtcctcactcgtatcggatctcgatgtctcacggggtagatatcgcggtaatccggtctgatctcaacgtccggagtttgtctgacgattttcgatctcgttcttcctcccctctgactggcgagtaattcgatcgatgtggtgaggatagtcgtgcacctttgtttacgaatcgacctctggtcaacccgaggtttccctaagaagatcttcacgtacgagctcgtgctgtggttattgtgtcggcgtggatgtcgacctcgctatcgtcgtcgttgccctcgttctcgttctcctgtacgtcgagatttcgtgctcgaccctcgatacggttctgacgaggtgcatcgaatttcccccccttgtgacgacgagccggtcttgctaatccgacggcctaggagaattcaggcctgtatctgacggcaatgcttgcagtcctcctgatcagaggaatgcggatggttgacacaccacgacgaggagtgggtcgtcctttgatagagacgagtgcggttctcgttctcccctgttgacgtcaacgcgcgggtaggtgttgctaggcctctatggaggtgtgtctacggtcgactgtcagacgatcttttcggaaccggtcggggtcggcgacgacgaagacaatgttgatgagcgatgagcgatggatcgatcctacgaggtcaggcatgagagagttggttggtggtggggtaagtgcgtgagaggtgagattcctgctgccgttgggtgccgagaggcgtttgccatgccatcgacatggggagaagggtagggacccttccacccccacttccacccctacttccactcccatttgcatggacgcttacgcttgcattgatgctcatgctcacgctgacacttacaattcgacaggccctccaagcgatggacaactcgcacgtcgccctggtcaccgtcgaattaaaggccaacgagttttcacactatcgatgtgatcggaatatcccactcgggatcagcgtgagtccgggtccgagttcgagtcctggggatttgggacgaggaggatgtggatgcggatgtggatggtggttgaccggttcgatcttttgtttttttttcctcttcgttttggctgtttttttggatgacggtggttgtgcttcgtctgggacgatgatttgactcgctcgtggactcttggaaatggacctccgacccggacctaaacctcgccaaccttgccgctcgtcgcacatcactcgcacagctggccagcctgaccaagatcttgaaatgcgccaaggacacggacgagctcaccctcaaggccaacgatgatgcggataccctcggactcgtctttcagaacggaagtgagtcggctcgggggcggttttttttttggtcagattcggagagtcggggagtcgggtcgacgttcagggcaggatgggatgggatgggatgggatgagatgagatgggaaaggatggaaactcggtctcgcgttcgaggagaagtgaccgacgacgcagtgtgggcggacttgcgaaggttaccggagatgtaggggcgggaaacgacataccggaccgacaacggagacggctgggaaaaatcgagggccaggatgggtctaggcgatagcgtttagcggaccggcgtctcacgagccgatcgataaagacggctcgggttgatacactggcgcgacgtcgcacagcgcgacaaccccttggacccgcagcgacaacccgattattatcaccgcgactgacccgaccctcttgccctcgcgatagaatccgatcgactcggcgagtacgagatgaaactcatggacattgaccaggagcacctcggtatccccgacacctcgtacgacgccaccgtcaccctctcgtcggccgaattcgcaaggatctgtcgtgacctgagcgcactcggtgaatcggtcaggatcgacgccaacaaggacggcgtcaggtttacgtgcgagggagagattggtaacgggagcgtgctcttgaaacctaacggggcaggcgtcaggtcgggcaaggtcaagaaggaaaaggacggcggtaggaaaaagaccagagtcgtcggcagtgatgacgaggaggaagaggacgaggatgtaaagcccaaggtcgaggacggggatggtgagtcggcgtccgaatgtcgtgcgcgcgacaacggcctatctgaccggggcgcgtgtcggggcgattcgacagacgaggaagcaggttcgggtgacgagcaagaggaagacgaggacgaagacgaggatgctggcgcgaccaagaagcgtaaagccgctgcctccaagacggccgagaagaagggggccgccaaaaaggtgagagcccgcgccgacgacgccgacgacatcaaagctgaccctcacccccgtcttggggacgtttgtttgaaaggccaaggtgaccgacactgacgaagacaatggcgtcagcatcgtcctccagcaagccgtctcgctcaccttttccctgaagtaccttcaaaactttgccaaatccgccccgctctcgagtcacgtcgtcctgaacatgagcaacgaggtgccattgctggtcgctttcgagtttgagcagggtcacatcaacttttacctggctcccaaggtgagtgccacccgggtcaaagcgtgcccgtcgtcgatcgcaaactgactcttcgtattcgatcaactttttgaaagatcggtgacgagtagtgcagaagaacgacccggtcgatccgtcgtcataccgcatgtttttacgcagcctcgttctattcctttttgtattgtaccgtacccggggcgtcttgcatatgatgaaatcaatctaatacggcttgtcgatgcgagcgagcgtgactataggctacggcgacatgtctacgagggtcgttgcgtacaaggaaggagatacagtgagggttgtcgaaaggggaatggcataaggcgaatcttccgcgcgcggtcatgaaaatggtcgtaaaatagataaaaagagcgtggagaaaggcgttgatcggtgggcgaccccagtcgtcagaaatagcttcgttgcttgcgatgtctagttttcctcctcgtcgtcatcgtcattctcgtccgagtcgtcttgaagaacggctctttgaaggatgtcgtcgaccgtgtcttccacggcagcatgcgatgcggcttcgggatcttgcatgacgacgtcgccgatcatctcggcgggttcgacgaccggcacttcgtcctcgtgcatctctgcgaccgagaggtccgcttgctcttgctgatccgcgggagggtgatcgggaacgacggccggcacaggatcgactgcggcgagatcaccggcggaagcctctgcggcgttcgcaggggtcaatgctggagccggaattggcatcggaggcacatccaatccgaattggactcgagcagcagcatgcgctttttgaaacgcggcgtgatcgttctcgatacctgtgccggtcggcgtcgtctgttcaggcaatccagcgacctcttcatccgtcaaccgagcgccaaggtgagaatctatacagtgagacaagaggcatgtcagccgagggcgcgctttcgaagggtatcggtcccttgactcgcattgttctgcatgcgcttggttggcttggtagaagcatctatacgggggcggaactgaacgtgaatagcggaaaacatgtcaggggacctggatcagctcttacgtgtagccccatttgcacttgaccctgtccttgatggtagctggaatgacggcttgaaccgtaggcttcttgtaatgccgactccaccactcggccaacccagcctggacaaaatcaccggtcagggtcagcgaccatgacagacgtccgagctcggcgtcctctgtctcaccttgaagatgttactcccgcacgaatgacaaaatctccccgtgccgccggcaggcttttgcagtcccccttgaataccgaaacgttcgaacaaacccttgagaccgccagctgcaacaccttctgtagacgatagccatatggacaactctgcaaagacgttgttgggcgaaaatttcctgggacgggctgagtaggagtcggatggacgcctgccgataagggccagagagttttgcttttgtacccaagtgagaaagatggctgcttcggtcgcgttgtgactgtgttacgaggtcgctcggtcgtgagcgcaaggacgagacacgtcagccaaacttgaactgaccggaaatatccgagaagcgcctgggcaaagcgagggctgtgaatcgtatccggaagttcctccggatacagcaaatgctcgacattcgccggcggttcatgcaggttcttcaacgtagggtgtttgcactgtcggccatcggctcatcagcatcggtttcagcgaatgcctgaagaggacatacaccgagtcgtttgcaagcgctctcgccgcaaccatcacacgcttcggccagggactcgggcgtgagaacgtcgctgatcgagcaaccatctcagcccagagcccggggaggacgcgagtgtccagcacgtaccaatttccacatagtaaatgtcctgggcagggcatatctcgggacagccgagtcgatcggcgattcggattgggcacctgtgatgtggaaccgaattgagctcgatattgaaacccatatttcaatgctgccgtcttaccggaatgggacagacaaacgtgccagcaggtctacccggtgcaggacaatatttgcacaattgccagtatcgatctgttgcgcctccttctcctcgatctcggtagatgtgaacaggagccttttgaaccgcaatgtacgaagggactgcggagacaggaatgggaaactacaggaagcagcatcagatgccgtttctcacgtcaacgtacagcagactcacactcagagcctgtcccttttcatacgtcttgcgatggtcatcgatggcgtcctgttccctcgcgaactccggtcgagcctggaatcaccagctcgcctcagttcataggcgcaaatgcaatcagagggcacactcaccttgaccaacaaatcagcagcggcacctagagccaaagccgggacaattgccgtgatcggggtgcgcttgcagaacacgcaactgagacccttgctcgatagtttcccttctccgagcttgacctcgacgggcgcatttgcgactgggatggcaggcgcggcgatgatggcccgctgttgaacttcgggagcgacaggtccagcggccggatcggcagatggagccacaggcggcgggttggtgagaggtggagattgagatggagcttccgcttgaactgccgctggagcgggatctggggcctgagcaggacccggggacatattggccgaaacggcagttggctctggggtctgtgcttcatcgagatcgagcgcggcgatcgcttgggcggcgaaggcggtggcttgcagagcaggggtatggttctcggtgatgacagcaggttgatcgatgacaggagcggcttcatcgtttgcgacaagtccgatcatcaccgtacctccctctgtgagtaccaggcgagggacttctgctccagtgtatcccggctgagaatcctcgtccgagtctacacgtccgccctcaccactcccgtcctcgtcgctgtacttgctataaaccgatgcgtcgtcatcgtcatcgaccggtgctggcagtaaatccgcgttctcgtcagagctcccttcgctatcggaatcttggtcatcgatataagcttctccccattgattgtacttgacgttcggggcaggagcagggatgttaatcttgtgaacggccgtcttgaggttgagctccccggcgcgtttcctctgagcgtgattaatctccaacaggttggtacgatctcccggaagcgtccaaacgagcttgtcgttgattttgtatgatttgagatagttggccatacaggctccgcagtacgagtgtccgcaaggttgtacagtcacaggctagcaatatgtgttgagatgagacggtcaccgccaacgatcacagaaggacacgactcacatcgataaagctctcttgacagatcccgcaacacagttcctcctcgaatctatccagcaccatccttgttccattctctttttccttgatcatcgccaactcggccttgaggctttctatctcttccttgctatccttgaggtccatcgcgagacgctcagctttctcattatctggtgaaggtgcgtgaggtcggccgagtgttttcaacctctgtcgttgggacgatgatttccgcctcgagctatccgacttcgagctctccctcggttcgtccggtgcgttatcgatcttgcgacgtttcttgacctgacccgagccttctctcatactggcgttgttcttgatgttgactgaacgttccttgtcgtcggtcttgtcgaacaacgggtgataacgatgtcccttcttctttctactgctcggctccttttcgctgccgtgtctgcctacgcctaccgccttgtcacccggatgcgtagagtctcgctgatcgatacggtcgtacaagtcggccgaatgattccagtccgtatcggggcccttgcgtttgttgccaaacggcgaggaagagcggtcaaaggatgcagaggggaggagactgtccatgatttggttcgatgcggatgattcggcctgggacgttgatgtcggtccgaccgtcatcgtgaccgcttgtcgtatgatttcgagtttagaaaagcagtcgctttgggagatcgactgtctgtaacgcgtccggcatataggtattgaacgggctgttcacaaaggaaggggaaggatgattagcctttaatgcctttcctatcaaagggctcgagggcatcccgaagctcaagcgtacctttatgccgcttccatccaattcagtttaccattcgagatgccgaagtttcacgtcgaagttgaggctgttgttcgtgtgcttcttatcagtactctactatatcgccctcctgttcacacaatcacaaccgttgacggtacctgatgttccgtgagatttcggggcagttactgatgtctttgcttcgcttcgacgagctgatcacgggaagatccaaggatttgttgcatccaatggtctcgatgcagatctcgacgtcctctttgaaaaacgtacactctgatgaattccaagttggtgtcaagatgaatgcggtgttcggctcaacccggtcgaggctcgaagtagagtgatgagtgatgagtgatagcggcgacggaatcaaatctcggtagcaaatccagattcttcggaagtaaacttagatccggtcattttgagcagccaccactttgtcaacaaccgactatcatatcggcacgcccgcacatcaggcttggacgggaagcgtatatcgacttgcatctccattctgagctggtagcctgtagtaagatatcttcagtcgaagatacgggtttggtttgggtcgtggggatggacaccatcgacatgcgggtggctacctttgggccgatgtgctggtacggttacttcgacggaatctgcaatgtgtttggctcgtgctccactagttttgatttcgaaatgagcgcattgttatggcggcctttccgtgagcatcgggaacagatgaaaaggcgtgctgtaccggtacatcgatggccctcgaggtcgatcgtgatatcgtcaaatcgaaattataggatagcgatgggcggcgtacggcaagatatcgtacaagcaaactcttcggaccggaacctcccaagtgcggagacttttcatacaacctctctcgatctctgccgggtactctcctcgacagatttgtcctcggacgtttcgtcctccatacccagagcgtccctgagcttcttttccacctcggcgacctttttcgaccgatcctgcctatgaaacccaaggaccgcctgatcagctacttcaacgtgcgcgggagacatctcgtcgaggacggctcgcgacttgccctttccatatcaagacggcgctggcaataccgcacaggaatgacaacgggatcaacgtccccgtcgtccatgccggtcgttcgtgtcgattcagaccccacatcgtcccgcacaagaaacactgaaagacactgttcccgatcgtgaactgcgttggggaaattcattcctcagccggggtctcactcgtcggcatgcgggtacgtagtagagatacgcactagacaaatccagagcgcccaattgagggaaaaggctcggtgtgtgtccgtcgcgtggggccggtaccaagtttgactcttcccaaacgccctctgctggtacttgagcctctcttgctgcttgtccgtcaatacctgtcggtcgaggaccccgcaatgtcagctcacaccccaatcccgcacactgaaggacggccaaggtcttttcactgacctgaacgaaattctcatccgtctctggatcaggggcctcgttcttgtccatcaaatccggcaaccctcgcttcttcctcaaccgtcgatcgatatgttgtaacctccagatcgcgctgattcggtaggcgtcccggactcgccaaggaatgaacccgaccccggtgaccgtgaacaggccgttggtcacctgagacgagatttctgcatggccggccggatggaagaaatcagcatggacgagtcatgtatgtgttaggggatcagggcgggacttgccgacccatttatccttgttctccttgctgcccgtatcgatccatcctagaatccccagcgtcagtgacatctgaccatcaagttccctgacaatgccagatccaactcacccaacaagaacaggacgatagctgaagagcccgtcaacatcatcagatcgaatcacgtctcatcgacccatttccccaaccttgccgactcaccagcaccccagaaggccaccaagaatccatagatggccgtgatgatccctatcggcgtcttgacaaacgcccacgcgcccttcatactccggacgaaccattcctttttaggcgaccgtttcttcttactcaagacgtccttgacgtgcgtgtccaataggtcctccgtgctctccgattcgagaccctgcggtgcgttggggtcggagagtcgacgttgctgggctgcctgagtgggtctcgctgagggcgtatcgagcgtgatggtcgctttcgatttgaagagcgaggggatcggagggatcatgatggcgtttgccgcatcctggaggtaagtcactgtgcgaccgacacgacgaggagtttttagcaaggcgtttccatcttcattctaggagagagagacattcggtgtatcgaccgggggagggggagacgtacctgccgagacctgcgcatcgatgacattgagatgatcgaccacctcatccctatgcacatcctcttcatccctctctgcacgtgtctgcatcgacacctgcgcatcctcactcccctccccacccgtcgagctggctttcctactctctctccccgtcgtcaaccccttttcctcgtcccgcgggtgttgatccgtccccccgagaaaggcctgcttcatccagccgatagaccccgtccgaggtcgactcgtccgagcttcctcttcttgcgacgtacgtacgggtggatatccatcccccggagctcgggaagaagagacgctcttcctatgcgtcgagttggcccggagctcgagatcacgttcggtcgatgcggagaggaggaggtcgaccgaggtagggtcctcgatgacgggcggaccgagcgtgcccgtccggttcctcgtcgtcatcgacccgggggagatcgctgggggaccgaggatacagtcgatcgtcctcgagcggttccgttgcctctcgaccccccgcatagtcacccccgtggaattgccccgggaggtccctccgtcgatagggacatcttcctggaactgacccctcgatccttttctggaagaccggacgctcaggttatgcggctcttcatgcaaggtcgaacctcctaggacgacggcgtgatactgtccatctaccgctggtgtcagacgagccggctcgttgggttgatttctctcaaggatgggactggtactgctgatagtattattactactggacatgggaaccgtctcgtccaagttccgggtagtgatcgtcggtcttctcttagcggacgaacccgtccggtcgcgtttgatctgaaccgaggtcatggctccgggtgtgtgacctccgactattgattgatgataagcgacagtcgaagcgggaggaaatgcgttcgcttacggcctagtctccgtagagatcgatgtgatgtatgtggccaaggctgttctacttttgatggtagctcgacatcagtgtcccatagatccatcgacctggctcgttccctttggctatcgacccgaccattgcgtgttggattgtgtttcgctgcttttcggaatcaaatttgatcccgaaacacaccaattaccgcttcagggaacgtcctggccacgggccccgtcgggattccgtcggaacaaccgagatgtaatcgaggtcagggtacacacacacacacacacacacacacacacacacacacacacagcccaggtcatcaatgaacaaatgctttcgtatcctatacaataatgatgatgatgctagccgaaccactcgatcggaaaaatacatacagggtccatcatccttctcctcccgctcgattcgaaagacataaatgatgatgatgacattctgccgtccgaacacgtcgctcccttcctgatcaagtcacggcgtcgtccctcgtcctcgagaccttctccttccctttccaaatgtcgaatcaccggagcggttccaggaaggaacacagaatcagaccgaccactccgttcatcgatttcccgacgaggagtccatcgtccgggactcccacgtcgatcgggatatcggccaactgatccaccctcccgacctcgttcaggatactaaaatcagtccgccggaaaggaaagaaaaacaccccacagcgcagactcgtcagcatgatcccctaccccggcggtctgagcccgataccacgtcgaggggagagactcactcgacgacgtccccttcctccatctgcaagaacggtaatcccgcataccaaatctccatccccaacttgaaatccgcaacacatgcacactggtacaacgccgtctgatccgtccattcgaggaagttaccatcatccccgaggttgggactgttcatcaggaaatccctcggagttccaccaggactctcgaatgggaaattcggactcgcgtgcgggtcggatgacgagggcgatcggagttgggattgagaatgagcgtatggatggggtgggacgaggtatgtcggtcgagggcccatcgtccgtccgcccgtactgctgctcaattgcggggaaggcatgttggggaaatcacgatcggtgatatcgctaggtcggggcgaggggaagggagcttccgagacgatcgagctcggtcgtgaggcgtctttacgtttcgtcaagaacgaggtcgagcgcgatcggttgccgttaacagagggaggctcggtagggcggaccggtggagtggggccgcgcatgagttgcggggcagacggggcttgagagctggcttgtgacgggacgcgagatgaaggcacagtgcggaccatgccggctaacggaaatgtcatgcagagatgtcagtcaacacgacgtcactggctgtcgacccgtcccacatctcacgctcacgatgactgatccggagcgcctcgatctgttgcatgaacggcttccaacattcatgccaccccttgacgatcctctggccgtccaacacttcgatctcgagatcgcgtaccccggcgcgatgatactcggcctcttccgctgcggtccacaacaagagatactctcgaagcttgttccgcaccgaatcgtagaatctcgcttgggcattggcgaattgcgcgagggccaactcgagaatcttgctgtatccgtcaatgtatgcgggaagctcttctagcaactgcgtgtgcaaggcgacaaagtcctcggcgccctgaacgacagacttgtccagcgccttgacgtccgatttagacctggcgctttgaaatctggtatagtctgtcagccgagcttctcgtttctgaacaagacgcttggggttgacaccgagtcgcagcaaggtggagaacatgggcatgaccgtgttgcgcacgtcgtcatcctgcaggcagtcagaaccaatcgtcagtcttgtttccggcgacaagattgggcgacacgactcggcttaccaattgcatccacggcctatccatcaggtcgtcgaccatgttcccatacatgtcgattcgctcgtcaccaaagtcgctcccgtcgagtcgcacgaccgaggtccagctgatcatcatgttcttttgcgcttgccacgtgtccctgaccttgtctggccacatgttgatctctttgccgaccttgcggaccacctggtcggctgcgtccagtcgaccgatgagctcgtacagctgtcgctcggatccaggtacgatcaccgtcaagctcgccgtacttccgaccatggccgtcgtgggcgcggccttgtccttgtccttgctcttgccaaatttttccctaaacttggccgacatgccaaacaccttgacgtccttgttaccactgaccgagcccgtcgtggttggtcgctttctgctgtctttgctgatgatacgctcgaccacatccttgcgtcgcttgacctcgttgatctcgcctgcgatcgacgtggccccttcgaaagccttgcggaggttaaagtagtctgggtggactggcgaggtacaatggagtaggtcaccaaagagcagtggatacttcatgactcgctggactggcttgatcagcatcgagcccaggtcccaagcgttggtgaatggctggatcgaggtccagcaggtctgcagataattggcggtcttggtgtcctgcatgagctcgagaaggcgagtattggcttgggcttgccgggcacagtaggttgtgtacatgttggtgatcttggggatctgggacgagacatggcaacgtaagttaccgaacattttcagtgcagatacggccgattactcacgacgttcaggaacacctcgccaagcctgtccgtaatgagatcctcctggccttctttgaggacaggctcagcaccggtcgcatctcccagtgccctttcgaacgacgtggccagctcgtctgcgaacgctgccaactgctcgagattgatgaacaatgtccgggtgtctgagggcgagagtgcctcggacacggtcaatcgtcgacgaggcgccggcacagcttgcgtggtgtcggacgaagcagaatagatgcccgacatccgtttggccgacccaccaggccaagctccgttcgatgtaatcgaggcgctgcgcccaaagtcgggtcggaccgtattgtcgttcggcacgccgacgtcgttcagatccagcttactggctgcatgcatgctcgactcgtatgtcgtgcgactcgtcattgagctctcgacagtataggctgatagtcggctcccgccgctctgctctcctggcgaggtccacccgctgctcttgctcatgaatgtcgacgtcatcgagtgcgcagaagacgggccgactttgagtaggtatacgtctcggatgagggctagatcattggcgtaggaccgctcggtagagcagatctcgtgtataagatgggcgcgcttcgtcatccgagtcgttggtgtcatactggtgggcgaaaggagtggcggtgtgccgctcacgttgatcagcggtgagaccggactcgactgcgaccgagtgtgcaccatcggaggtcgtgaaggtcgcgagagtagcgcaggccgttcgcgaggcattgcagcagagttcgcgtgaaggctaagcgtcgaaagcgacgctggaccagctgctccggtggcgtatgcaaagttgggcatcgagggactcttcgagggcgaagggagttgcgattgcgaagtggaatggcgaatgatggattcccctcgttgagggtatcgataacgttcgtcccgcagtcgaccaccttgttctgaaaggcctgatctcggcatatcctcctcctctggcgtgtcaggcaaagtcttgcggatatctgggacttgcgacccggtgcgattagccctgggtgcgctggattcggcttcgagctcggcagcgaagcccatgacccggaccatgtcggcggtggtgggtgattgtccaccagtcttggctccggtggcacgagatgccacgtcaatacgcaggtctcgcttgttcatagaggtcgcagaggggcccggaccgattgtggcctcggacccagacgacacggcgctggctgccgagaatggctgtgcgctgggttgcgaatacaccgagacgatggtatcgcgaggatcgctcgctactccggcgtctcccgtttgcgattcctgtggacgagggtcgaacttgctatcgccatgttgctcgaccttgggagtgccggtccgagactcgtttggcgtacctgtcctgctagtggtcaacgacgacccgtccttggtactcgctcgtcgtctcaaggggttacgtgctgggataggtggcgtaggaccgtctttggtatcgcccgatccgacgcgagtgtacatcgacccggcagccaggttgttgaccggcaaaatcgccgacgcgtcgaccggctggaggggcactccggagatggtcgtgggcggcgtggcgtacctcgtagtcgcgctcccgactgacccttgactggacgtcctcgaaggtccgggaggcggctgcaacatggtccccgtcgagctgcttcggctggacctatcgagcatgggtggaactgggggatcaatccgtaaatccggctgattcctcctctgcccgaccgtctccccctcgctttcaagtcctgtcgaccgtttgccccccggactctcgaggacgtctacaccacccctcgattcgggcgcccgatacgttcccggtggtgccggtgcgagtaacccttccttgtccctcctcgaatgaccgctctgactcgaccccgagggcgtcttggccctggcaggcgatttggcagggatcggaacgggggacgtctgcccggagctcctccctgacaagtaccctgtcgagattcccaacccggtcagcccgcccgtcggggtccgtccgatagggctcgagcttcctgacgacgtattcgaccgtccgcctggaattcgggtcgacgttggcaagctgctcatcctgggactgacagacggggcgaccggatgagaagcagacgaatcatctggtccacccaggtcgggcgagtttaggtcgacgaccccggtattcgggttgaacgaagcggtggtattggaagggatggaggagcgtcggtcggggatgaccaaggccgaggcatcggtgacgaacgatccgagatagtagggttgaggtggtgatgtcgagagggctgaatccaatccgggctgtatacgggtgggtgacatgggcggggaagatgctccggaaggccttcgtgagcccgaacctagatcacgttccattcccatcagtccgtgttttcaatcgagcgtacaaatgcccgatccagcctcgaatgcgaaaagatcgacgcggcccggatcaagggggtaactcaccgatttccctgccatacaaccaacgatcctgctcgaccccgccttccccggtaccaaggccgatcctgctcctctccctatccgacgattttctcctcccacccgaattgatcaccggcccgagtagaggcaacctcgaccccatccctgcctgtgtcaaattatccgtgctcccccggggagaacccgagggcgatcctcgtccatactccaacttttgcgggagtgggggtacgacctgagccgacccggttcgagctgaaaccgagcgtgagggtgaaccgataggggaaggggtaggtggtcgagattgtatattccccgggatattgttgttcatgagacgctcgtccctcccatgagcggataatcgggaactgctcgagttgctgatatccgatcgagaactccccggtcgactgtgatcgggctgctgacggtggtgaatagagctcgagctagaccccttccgactactcccagggcgggaagaagacgagctcgatttgggtacaggcaacctgctccccgtctcgaaatgcccgctcgctgacctcgaccctgatccgaagtcaggcctggccataccaggctcatacccgttgggaagaggaaacccggcgtattcctccgcatcacccatgatcggtgttccggccttggacgtactagcagaaggatgcccgctccggatgctagacgtctcgacgtccgtatcgacataggtcgatcgagtagagtgtttcttcgtccgaccgggcgtggacggtcgacggcctgaaacgttcgagtgagcgttcaaggtcgagctggatgtgtccacatgcgcagatggtcgtcgaggtctactcggagaccccgatgtaggcctatccacctccccactgatcctcctggggatcaagctcgtccggcccggtgagagcccttcgtgcgtgtgcgtgtgcgtttccccgactcccgatgcccctgaaggtctcctccgatctgccggtcgacgggtcaaccccgtagccgaggatttagggctagacatcccatccgtctccccgctcgtactcggggtgatggggagagccgtcccgctgatcacccggtacatgggtgtagcatctgggtcagtcatttcgctaggcctcctcgtcctcgcccgtggggtgttccctgctaaccgaacgtcgtgtgtcgctggcgaggccacttggcggatcccaggggaaggagagttcgaggtcgtgagggggatagaggtaggtgggggcgtggtaggtttccgagaccgagaggagaggtgccgagggggtcgaattgggtgtcgggttgggcgaggtggagagcggggtcgtggtagacgaaacggatttgttctgggaggggggaccgccaaggaagtgggacgagcgagggtcagtgtgcggtgttccgggctgcccactaggctaggacgagtcgggcggactcaccgcgatcatgctgttcaacacgcttttccgcttccaggggacgtagaccgctttgcctgtattcgagtccgagatccagatcgtaccaattcaagaaaccgagcggataacagagagggagcagcaatcggaatttcagcgtttggcgtgtagtccacgagctggcggacaagagcagatgtactgaccttctggaaatagactatgtctcatcctccccgggttgacctggacgaggtcgtctatgacaaagccaagggaggaatcagtatgggccgacggtcgtcctagctttctacatctcgccatttctgtagacgcggccggtgtggacactcactccctttacccagcccgtcgatggtgcgtacgagcttgacggtgatactccgggaagaggcatgtcgctatcgaaacggaaacctctctgtcagacgaggacgaggacggtctaagcggaatggggtcccgtcttttgcgagactcacgcattgacatgaggacgaggaggagatggcggatcggactggtgcgagggccgctcgtggtcgtattgatgtgaacgacatggttcgtgtcgaacgtctttgatgacgatgtggatgttcgtgagtgtcggtcgaatgatggtgtatcgagacgtgcaaagtagtcgtactgctctacagatctagctgcagatgaggttcgattctgaattctcgaggtcgatgtatgtgggatgtggaggtcgatgcgtgcgttgcgtgcaacttgaactttggtcgaacgatccgcggataccaaattgcaaacaagcagtagtgattatcacctagagtaactagttgctagctagttgaatgcaatcgacgatcgaacgtttcaatcaagtcaggtattcagagtaaacaacatgactttgggcagcaggtcactcaattatatgcctggacaagccggatctagaccataacctcaattataattcaaatagtcccgatttgaacaccaagtccgaagcagtacaccccctttgacatcgacctgacccctccggacatcgtccatcgtcatccacccactcgcgttccaaccgctctcgcctccgctcgcctccacttttgacgttatcgcaacgacctcgaccatacctcggagtaccactacaggtcgacctcgaaagacaccccaatcaacagcttgtgacatacccaaatcatcgacccttacctgcgtcgttaccagaagaatactaactggacacctctcgttggaacaccatcagccagagctacaccaacaacctttgctcaggccgcaatcgacctcacgccacacgtgtttacccctcgtttcgcccctttctcttagaaactgggacgacttgggataaacgctcttccacacccttcctgcgatgagcagtaccaatctacacgtgtattacctcgagaggaatatcacggctttcaagagatacctcgatgggaccgagacgtttgatcagcacctcgccgggtcggggaaatccagctcgaatgcggtaggagggacgttgcgacctggatcggcgagtggaccaaggagctggagcttgaaccaacatttcaataatagcaacaacaacaatggtcatacctcgaaacgaccggacccgaacgtcagggatacgttgggacggacggtcctccacttgatatgcagtacgacgggtgatcctcgatcctacgactacctctccatcctcttgcaccatcctcaaatccagatcaacctcgccgacctcgaatccggatggacccctctccaccgggcgctctgggtgggtaacctccgcgcggcgagagagttgatgggtcggaacgagatcgacctcggtttgaaggattacgaagggttcaccgcgttcgacgtcttcaactcgacgtgcgaggggacgaaccccgtggatggcgcccgagggacagatctgtacacgtgggggagtaataggaattacacgttgggctcgggggacgctacggataggtccttgccagagagggtcaacttgctcaatcaggttcaggcacgagcggcgggttcgtcttccagctacatcccacctgcggctgcagacgaggtggacgagatggacgatgtgacaacaggcattaccggtccggggtcgggttcaggctccgggtcgtcctcgacctacggggaatcgaccaaattcgaccgggtcggggtgcaagacgtcgtcatggccaaattccacacgggggtattgagcagcgaaaaacgggccaacttgagtttggcgggattcgggtcgaatgggaggtcagtcgggatggaccatggggttcgggttccgagcgggtctagccgggggttgagagctgacatttcaacgaggttttcttcttttttgttctcctggcaggctaggtaaatcgatacattcgcagtatgcgctcttgcctcaacaggatctcgcccacctggacgtcgtctcgatcgctctgggccaagatcacacgctggccgtgacctcgggtggatacatcatgtcctggggacagaaccgattctcacagctaggctacgtgatcgaagctgctgcagagacggtccacaaggctttcaacaccaacgctggggaagaggttcaggtccaggtccagccgaaacgcgtcgtcgggccgttgaaaaaggaattcgtcatcggcgtcgcggcgagtcgtttgagcagcgcttgctggacgcacgattccgtctggacgtggggcacgaacagcgggcatttgggttacgacaaggcgacgaatccggtccaggttcagccgagaaaagtcacggggatcagtcagtcggtgatcgacatggccatgacggattacgcgacggcgtgtttgatagagtcgaaagaagtgctcgtactccatcacgatgccgtgatcaagatcagtttccccactcagaggttcccgtcggatttcagcgtctatcggccaccgcagtttgtggccaaacctaatatcgacaagatcacctcgtgcgggaacacggtcgccgccgtctcttccctaggagacgtctttacgttcaacttgcccaaccccgtagatatcccggatatcaaaacgtatacggtcaagcctcagatgacatgggctttgaggaaacggttcaccgccgtcaaggacgtcgccctgggctcggactcgaccatcatcctgtgcacgcattcgggtcacgtgttcgtgcggcagaggcaggggaaacaggtcaaggtcaataggttgccacgattgcagcggatcgtcaaggtcgcttgtaacgaggtgggcagtttcgctgcgattcggagcgacgccaccccgggcgaggtagaagtttcgggtccgacgttgagcgacgacctgctcaacctcttgcctcatatgcgaagggtgatacagtcgccgttcgggaaggccgagagggtttatcgacaggatcaagacgatgaggatgacggcgatctggcggtgctgcaggatatcgaggtcgccatgcggatagccatcatcgatgcgcaatggcaaacttcacacgagagggcgacgttgggcactgacctgtggctcgtggccagcggtcgacgcgtgcccgtacacaggatcatcttgtcgcatcgcgtggccaagctcgctgccattttgaaaaagacagcagtaccaaccagcctgcaaaactcgatgcggttcgaggtcggcgaagcgggagaatgcgagttgcacctcgaggatatgcactttgtcacgctgctcttgctcttgcagtacatctattcggacgacctcgccgccatctgggacagtcgagttctctctcgcgtccaggcgcaaatgccagagttccgcccggatgtcaacaagatcaagcgggagcttgtccagtggtcagagaggctcgagctggacaagttgcgtgggccgttggcttcgacgggcaaagtcgccgtgccgcagagtttaggcagcacatggaaggcgttttaccgagactcgcaagatccatccaaaaaggcggcaggcgagtgtgataccatcttgcgccttagcgaccgcgacattgtcgtcagctcgatccttttacgagcccggtgcccgacctttgatgcaatgtacgcggataccgtgtggaccgaaggccggcgggatcaagatggacacggccacgtcgttgtcgacatgacacaccttcagttccgttctttcaacttggtgatgcgatacctgcatgagggaacggagcagttgatcgattacggtcgtgagtctcttgtcgggcccgatgcttagacagtctagttttcttatcaagaccgcgtttcgtcgccctagatcaagacaccctcgacggattgctagactttgtattcgaaaccctcgcggtctccaactttttgctcctcgatcgcctcgtcctggtcctatcgcaagtcatccgtaggcatgtcgcgacgaataacgcggcgtctctggcttccgaagcggcctttcacaatgcggtcgacctgaagcggagcattttcttgtacattgcatgtaacctcgagaccatgctggaaaatgggttcttggacgacatggacacaaggatactcaatgacctggcgtccttcattcaagaccgacagggatcaaagctgccggtttcgcggagcgggatcttggcggacatggcggtacaaagagaggccgagtggctggcagaactggatgttcctcaattgaaagcccgtcctccacgtgtctggaagcctcgatctccaagaatatacgccacaccaccggtccaggcaacaaagccgaaaggaaagggacgtgaaaagctgtcgctatttgatagccagaatgaccgcgacccggaggatgtatttgagatggaggacgatttggccctaccagaatcggtctttagccctccacgcgggtcgactccctccaagcaattcacagcggtatctgcggatggttcgaaaggttcgccatggcgatcgtcgggcgttgaagccacgaagaagtaagtctaatatcgttcttgacgattatgattccgctaacgcttgatcatggcggatcttaggatggaccttcggagcatcatggccgaagccgagaccaaatctcccaagctcggcccatccactccaccgactggcactcctggcaagtacctcccgccatccgctcgacgacctccttctgccgcaggcaatgtcgcttcggctgcagttccacccgggatctcgcccgttcagaccatgacgccaggaggcgttcgtcccgaccgagcggcgtcgtggcgaagcactgcccctacagctggttccccttccggatttgcttcagcgtcagcgttccctactctaggaaccaccccaactcgaccgggtgcttcgaagaacccctcccaagctggaccctcaaagaacgacgtgatcgtaccgaccaggcaacctacggtgtcgagaaaatcttcgtaagtcgcaccgcctcgcaacatggtggcttccttcatccctaactgacagccgtttccatacagcgagcctgcctggataacaccggtcacttacttttcgcctgcaccgccagtactcgcaacctcccctggtccttctgctgcaatgtccctgctcgacattcaacaactcgaacgtgacgctcaggctcagagaaacgagctcaagatggctcccaagagcttgctcgagatccaagagcaggagcgtaaggacgaacaggccaaggtggccgaactcgagttccagcgatggtgggcggccgaggaggctagggttgcagcggaagcgagcaaagcgaatgccaagcagggcaaacgcaagaccgcggcttctgggaccaacccctctggaacacccgggcctgggcccagccagtccacgagccggcccaagaacaagaagaaagggaacacgggtccagtcgctgagcccaccccttctgacagacgcgaccagcctgtcagggacaaaccggccgattcggcaaaacctaaaccacccaaagtacaaaaagcacccagaccaccccaagcgtccaatggcagaaaatccgcgcccgcaggtccggctggatctatcccgcctacagcacagacaccgcctgttccatcgtcatcgccgatgccagccagtcttaacccttttgccaaaccattcggattcgttccaggtcctccagcaggtcctcttgccggtcgacgcgcgtgagcgatatcaagtttccgcagtacctgtatagaagtctgttttacatagatgaaccagcatcaccgagaagttgtatttaaataatgaccccgactaggattcacagttgtataagctagaagagaagggagaggaggcttgaatccgcatgatggacgacgagcttcgtgtcatggacgcgcatcttacgtaatcgaatttcgccgtaatcgtcgtcatcgggtgtgatatgagttgatactcgccttgatcacggtcaggatgtaatatcagatcatcagacctatgacttccagaattttgatctagcgttacaggataccccctctttgaaacgataagctgatacggagctttggacaatgtcttcccaagcccacatggcccctgggtggatgccgctgtccgatacctcgaggtaggtagtccgtttcgttcttgattgcgaccgcgactgacgactgctttgatcgatctggctagcgatgggctaggcagcttttctttcaacggaacgcaccctcctcacaaccatgagaaaaaacctcctgtcatgtgagccgatctgggtctcatgccgtctagtgctgatagctaaacgtcgacatcacgcagcccccgcacgaagattggcaaaatggactgtctctttctcctacccatattcgccgggatctccctcctgatcctcctcgttcagcgtttcggaccgcaagcatatcgttatgccactcagaagatatccagcctccgtggctacgaagccgtacccatcgaggatgacgaggaacctgaagctccttcagccccgaagacctacatgccttcagaaggattggccaaggacgtcatgaagcgcgtcaacgaggttggattggtcgcatggatctttgatcttttccgcttcctgctagtcgttaccctcttggcgttgagcatctatgccacagtggtggctcatgcccccgctcttcatggtcacccggatggaatgccagagaagggcctgatgcagagggaggacgacgtcttcgagagtctccgaaagaagggtggaaagaagcatcgcaagaacagaaaagccaaatttgattttgtgactcaagagtgggtcgaatttggcacgaccgttttctacgtgagtcgttcacccctagattcatgctgtacgaaaggactttgtcgttgacatttttttctgtaggcatacaatctcgtcctttgtgccgttcttctcggtctcaaagcggcatcacccctcagaaggatcatgtcgcttcatctgcacgttatcctcttcctcgcctggatcgtcttcgcctatagagatatctacccactcttgacgaagcatctcactccggttgacgtcctacacgcaccggcctggttgacttggactaggctcgcgcttctgacggtagccgctgcggtcgtgccagctctgcagcctcgccgatactttcatctgttgactccgaaatcgtccgaccatgcgtatgccgtcgaaaccgaaacgcctgaccagacagtgagctagttttgtattatatctttcatatgcacaaatgggattcttactggtgcccacgttgccacagaacaaggcccctgcgttcctggctggattcattccggaccgagcttcgagggtggagcctcatatcacgctgacctttgcccaatctgcggacggcaagatagctggacctggaggaaagcaagttgctctcagcggaaaggagagcatgcttatgacacattggtgagctggtcgcttagatttctgtctcgggcgaatcaatacctgagtcctttgaatatgtcgccttgccaggatgcgttcgatgcatgatgcgatcatggtcggcataggtactgcagcaaatgatgacccccgcttgaacggtgaggaatggcacactgtcctgcgtgacgtctagatgacacactgagccagacctcaatagtccgactcctgcccgatgcctaccttcgggagacgcctcaaccgattgttctcgatcctcagcttcgactttcgcccacggctcgcatgctgcaggcgcttgccgatgaggccaacccacacgccaggacaccgtggatactatgccagcgaatccaggattgggaccaggacatccgcaagcgaaaggcggctttggagcaagcgggtgctaaaattatcgagcacgacatgcccggaggtcagtacatgataaacttggtcgtcatcaccttcgtcactcatttcagccttgtatacaggccgtatggatttgagtcagcttcccaacctgttgcgttctctcgatatccattctgtcatggtcgaagggggagcgtccatcatcgatcagttcgtaacgactacttaccacgacgaagcggggcagcgtcgtccgttggccgactgcgtcatcgtcacagttgcccctatggatatcggcaaggacggggtcgcttacggttcaggacgaggtctgcaagccatcagagcttccttcaaagaaagatattccgagagatttggaaaggatagtgttctcgttttccagccatgagcgcctgatttcaagttgacaccattacactaggcatgagcttcttgtcccactttacgttcgtaggcgctataattatagatgacattatgctggaacggagggatcccgacgacaattgttacaacgtcgtaatcagcgcgagcgacggcttgccggttcatggcgcttgagtgggaggtacacaacgcaagggtgtcgattgtgaccctaaaaattgaagctgacgaaatccgcattttgcgcgatcgcgtctccagcagtggcacccaagttggaaaagtcttcctccttgtcttgttgacgggggggtggctgcgacctatcctgctgttgatcactcttgtgagattttttcggtcctttcggcggcggcctggctggagggctgcccgcttcacgagggcccttgtcagcccagtatttcctacgctcctccgcattcatcttgccgctactcccgtcgccattgaactgtcgggagctatcacgttttttctctcgttcctcgacacgtttgatgcgcttcgccgctcgatcatctcggtctgaaggcagagtgtcctgatagcgcactgtctgggcttcgttgttatgcactcctgaaccatccacgatctcgacgacatcttcgtcgctgtcgtcgtagtcatcgacttcgatgggtcggttcatccctccgtcaagctcgtcgtcatcaagtcccatctctgcctctttggaccctggcgtagggccagcagacgccttggctctccttcctaattgttcaagccgcgtcttctccgccttggccgcccttttaagcgcctttctctcgcttctggtcggggtgatatttttgttcttctcattgcccttctttgccaagcgatcgagatactgcaactcgtcatccgaattgtctgtcacgtgctgagcgtgagggtcgtcgttcatgtgaatagcaacatactgccggcagacgatgttagctgacaatttcgtcaatcgctatcgacaatgcgatctcaccttgtcttcctccctcgatgaacggctttgatgactggaagaagatttcgcatggctgtctccctgtttgcgagtttcgtcgtcatcgaaacgcgaatgctgtcccctcgaggatcctttcgaagacgaaggcatcgggaggttcaacattcgttgcaactcgccactccagtaaaggtcttccaaagctcttcgctggtcgagcatctgaaacggtcccatgaggtcagccagtgtgcgatgatctcggtcgaaaggaatgcaagctcgcctccgtcctgaacccaatgacatccttcaacatgctcatcttggttgggtcccattcgtcacgactgtccacccaaatacgaggtctgtgctcctttttgtactgcttccacttttcttcttgtgcggcgatattgtgatccaggatatccaccgcccgggcccaacaagtgaaaatctgattgagagaggtggaccccttcgagatgttgttggctgtgggtaacaaagctcgcgtcagctggatcgtagcgttctcgtcgcaagcaacgtcgacctacaggcatcttgcgggtcttcgatggcgatatttctagggttttgatgtccgtagatccaacccctcgatgccttgcggaacaagctgccaccatctctcagagagatcccgtacgtgtcccactcaaactcggcgtaggtgtcaaagaactcctggaacaagacgcctagattgcgctgcggatcgatagctctgttttgtatggacgcatggtgctgtccgatggaaagaacgttaatcggatacgataccctctctctcaacagacgagatatatgccgcgctcacctgaaggaaactgatgaccagacaaaatgtagaataactccccaatccgcccatgaacacttcgttgatcttgtactttctcatatacgccttgacgagaaggacgagatctcgagcgaccgggtattgcctcaaaaagtccccgaccagtcgggacgccctgatcccgccatcgtcgtagatcgaaatgtcaaccgagatgtttcctgttgctagactgttgttagcaaggatgtatcaggtcgattgatgaatcgtgctaggcccaccttgaatggtcttgagcttgacgatcggacacctcgcctggaggatcatctgtaccccgatatcattgtattgcccgctagggacgatgcgatgataacgcagggccgagatgatccgctgaaagatggtcctgattcccttggtaccgccggccaatctattcgggatgctatccttgacaatgacgatgtcgatatccctgagcatcaccggacgaccagtcaggggcgcgtcagctgtgcgttcgaacacgcgtcttagggccccgggacagaactcaccctcccggcaggtaaagacgattgacatggcttccaaacggttcaacgtccatgaacggcgcgtcattcctgaattcacgcttgatgacgtccaggatcacgctgaccagcatttctctcgcgtcgtgctcgttcctcgtcggggccaaccatcgtgccgcagctcgggtctcctgattgaaactggcatttccgacagcaacacgtactgagctcggtcctcctcgtcagacgtgcgagttggaagacgaggacttacagctttaatattccggccggacctcctacatcctcgttgaaccactcgacctctttgacccagggcaggtactctccacccttgatcggcatcaaatgcacatcatctccgtcgctcatggcatcggcctttctcttcttactccgcttggtccgatccttgtcctttttcctatctcgcgaagtggaagcggacgaggaagcctcggtcgtgttcaggttgtgtgacaagtatttctgagggggcggtgggagggtggaagattcgcccgttcccctgatattgatcggggaagaggtaccgaggggagagtcgtagccgccagtataagtgggtccggtaggaggtctagaggggagtacatgggtggccgagatggcggttccttgagcgttaggcgtaccggctagagacgagtggtcccgattcatcaatcccaatgttcacccgatcgacgtgctcgtacactgaccatctttcctcgatcgaatgatctcgatacccttgggtagcgcatcgtccgaggacgagcctccatcgaggtccatagcatcctcgtcgctatactgccgcgacatggccgctcgacccttgatgttgaaaccctgggacggctccggtctatccgacccggcacccaaggcgggcattctcccgtcgtcgtcgtcattatcattgtcaaacgagatgaaatcggcatcgttgtcgaaagcggcgggtgtcgatgcagaggaggaagaaggtgtttgagattgcgtgtccgcgctcatcggtggagcgtctttaccgaatatccgtttgaccaacgacatcatcgactaccttgcgggtacgttctcgttcaatgtggggtccgagactgctcgagccttgtgtgttagattgcgattgttgcgagagaaaggcccggttggttcggatcgcaaccctgttatcccccggaaatctcggttcgcgaaggtcaggtccgcctcgatcttttcgcccagatcagatcgttctcagcgagtccgttcacgtggtttgtccgagatccggtgtgtctcccttcaaaagtgcgatacgagagtaagactaggctctgacgtactcgtcccgggtgttcctttgcgttatttgaacgacgtcggactgaacaagctgggcgttggtaacatgcaacatgatggctgggtggaattggtggtttgatcttgataatttgtcaatttcgccttgtcaaagttgagaaatgacgcgagaaagcgggtcagaatagcaggaaacaaccctaggcaacattcaaaagaccatgatatattcacagagtacacacgtacacatcacatcagcacgactacacgaaatagggtgtgcaactgtatctcttaccaatacgtaccctctgcctctcaccatgtccaatcccgctcgaactgccgctctacgtgtcttgcgacctctcagagtcgcccgatcctccgccgccggaccatcgagacttcccctcttggcacccgccgtccggacgttcaggaccagtcccgctcgatcccatgccccgatcaaacccgtcatggctcccgctgctgaagctccgggaagcgtggctccttctcctactgccatgtaagccccaagccggatcgtcacgtttcatctcatcgccgcacattcatctcacacgccctggtctttccctcgacacgctcgttctcttgcccccttcctggatcgaaaacaacgggtaattcgaaccgagcaggaccttgtcggcagccgactatgagaagcattccaacgagacaatggagacgctgcatgaccagctcgaggcgttggtagaggaatacagccccgaaggtgccaacgggtgggaatgcgagtacagcgtgagtacttgccgaaaggtttctatctgctccgtcggacccccgacctttacctacaagatgatccgggaaagatgggatggctgatgggatgcgtcgactgtggatagtcgggcgtcttgacaatgtcgctaggaccacacgggacgtacgtgatcaacaagcaaccccctaatcagcagatctggttgagcagtccgttcaggcaagtccaagtcactgcctccctgtgctcatcttcgcttggttcggtccgacccgctaacttcgaccgtatcacgtttgcatatctgctggtccgcctgtccttgatcaaaccgctttgacatcccgcagcggacccatgcgtttctcctttatctcaccgacctccacctcgtcctcgagcgcatccgctcagggggtctggacgtatgcgagggacgaggtcaccctgggtgctttgctggatagggagatcaggagcgtcctcgtcagcgaggtcgggcaggaggaggcggacgcttgggtcggttccggggtcgagtagggttcgggtccgagtggctaggttcacgacggaggagaggagtatgtatctgtcgacgtgagatcagttacaatgcggatacggggcgcagagctgagcgatatgagctccgagtcgtgatggtagctcgaggtccctattcagcacgcatgtcatgacctcctcgataccctacctgcctgacaaccgggctgactgtacatcaaattgttcaacgtcgctactatcttatcatcgcatgcagcatcatttcatgctcgtcgccatctcgaatctattccgacacaccaagttgcagttgatgtttccttgataacgtatatttgttatcatctgagtagtttcgcctgcgggaccggtgatagtggcgtatcccggtgacgtcatttttctctaccctgacccggttttcgactctgcgtagccatggcaaggagagacagtcgacgcttgcatcatcccgagctcttatgaacttatgatgtgttcgtctcttcttgattgacattactactattgtgacccatacagctcgatagcgtacgaaacgaaatccactatcgtcaaccatgtccacgcaacctcctaaatccgcctctgtgcaagagggaaagaaccagcaatcgaccagcaacgcaccgtacgtttcggcctgtcccgtcccttttgatcacactcgagatgggcatgtgactgacccgtcatgcgctttacttggctttttcgactctgtagtgcttcgatgagtatggatcccaagaaaaaggtccccgagaacaaacccgccgtcaagcctcctttcgcaaagacgtcgatgaacagcttgtgagtcgccctctcccacgccgacaccatcctctcgactgaccgttcgcatctccgtcatcccgaccctttcctttcgtcgtacgctcctgttggatagtatgaacaacctcatcctcgtcgtcctcgccatctgtgcgatttacatctggcgagtgaccgtctgggccagcgaggccggcgggtactgggccttgatcacggggggtagcggcaaagcttcggccgctgctgccgcggcgagtgcgaccagcgctgtcgctgctagcatgggtgcttcccagagcgtcatcgacgtgagttgttaggtcgtctcttcgggaccccatcgttttcctcgggtgcaccacgattgatccctttatcttgcacgtctatatttcgaccgacacagaaggccgctgcgaaagccacgggaaagaccaccgtcggcaagggcaaggtcgtccacgggaacgccgacgttcagtcccagatctacgctctggccgagactttggggatcaagcctgccgacctctcttcggcgatccgacctctgatcgaccctaccgttcctaaccctgccgaggaggccaagaggatcaagcaggagatggagttgaaggccgagttggagaagaacaaggtcgagacggccgccaaggaggaagcgcactcggggcccgggttcatcgaggtcttggaagaggcctttttggactaggagagatcgggatccaagaagaaaggggatcgagagaggaacgtgtaggaagcgaggtttgacggcggatgagacacgggtctagcgagtcggtcatgtgcaatgaaacgaaactataaatgtcggctttatacatgatacgggatgacgacctggccgggactggcagtcgcaaagtctacgctcgaaccaattgaagacgatattcggctcagctcctcatcttcttgatttgtagttgcttggtgacctgtatcgagaacgagtcaaaccagtgcaaggccattatcgaactgccccagctgcagctgatgcgaatctgagcgattctgaaaacgaatattcattttattattgtgatttctggattttccctgacgcgacgcgttcattcgagcagtcgcgttagaggacaactggttgatcgatcatctcttcaacgtcgtcatttcgtcagttcgcaccatcaccacatcgagttgtcaagacgctgcgagcatgatatcgaccttcagctgtgcacctgttctcttgtaatcaatcggccatggaagtgccgaccaccccaccccctcggcggcccaccgctttgcgaacatatggcaagaagagggaagccccgctcttccccatccggggggggggggttatgttttggctttgttccaattttttcattttggttttgattgtagctgagctttggggcccccccccccccccttacacaatcgcaaatcggaaagacgatcttttcttttaatcaaccaaccatgtggcaagtctgtgtattctagtattagtactctcgtagtcatcttttatcatctgttttcgagcgaaaagcctcggattcgttgctatcttgatcatatccccatctcctgaccgtgtcgtcgaccttgacgccgtgtagtggtgtcgtttagtggcgaaatggacacaggggccttttccgcatgatcgcgatggagcgagcatcgctaacagccaaggcaacgcatatgatccggtacccagctcctgtcgtctagaccgatacgtatcgtcgacagacctctatgcccggatttcctcgcgtgaccgtaaaaaatcaacgacaccctcaacaacgcaacacccggggtctggaaaagacgatcggtcttcgttattgtctctctaaaggcccggcgctggccaccgaccaggcataatcattcaaaccgggatgcgtgcgccaaggcgcgggatcttgagtatgtaaggttgaaaggtgaaacaataatgactagctttggcttgcccgtgcgcttgaggctcacgtatccccctgcaaaggctcgactgacgttcatttcagcattcatattcacaagcttcggttccaccttggaaaggaaactcggtccgtctgaatagcaccatttgtacctacacgcccaagctaccaattagcaatgcctccccctgaagccgcatccctcaaagtcaaccgtatctgcgatgacagcatacatggatcgcctgacttgtggaagcccgaggatgatctttctgcgtggccagagcgagagcttttgacgaggtcgaatggcgagttggtttgtgcctcagccttcattatcaatcaatcctctgtccgtcggttctatagtgattggggccggcatcacaacgagcgttctgaggcccgtcggtcttgaagaagctcgacggattcttcttcatggcgttctgcctcactctggttgcgatcgtgccaaggtgatagaaaccgctgcattcgagggtgagcgctgtcgactatcacgccgatattgatcctaggtattgacggtttttcaacaaggtcttcgctctttcgccgacggtattcatatttggatggatatgtcgtcgatagtatcaatcgccgattctgggccaaagggggagacaaaaaattacgtcgcacatttcatgaggagagaaccatcattgccaggagcaccttgtcctggtctacatcttttgtttccctggacagtaccccggtgaagtagctgcgaacatggcgagacagcccccctaggtcatgtgttcttgtcgagaaggtttggagcttcgcctcacatgcactgcagggaaagctcatattactgactagcgcatatcatgataatcccggaatatgtcattgtcaaggtcggtcaagaggtgagcgcttgactgtggatggtcgcagtggggcttccaactcaagatgcctcgcgctcgattgcactcgcgaggatgccccggcttctggtggcttcgcttggtggcgataatgacgagtaatagctctttaccatatcaaccgggttcgtgcctatagttcagagccctcgcctgatgtacagccgcaatcttcctcctcacgatgtgtctgacggcgtcgccaaacagaccgcaagatggggtcgaaagcaagcgcttcatgagatgttcgcatttcgaggattcgtgctcttgcgtggggctcgcttccgcagaggctagtcgtagacggctgtgatatacctcttcaaggacacaactgcgtaagcgtatgatctgcctcagactgatcgtggcgaaaggtctcagcacaatatcctccggacatcaacgcgccactcaacagcctcgtatgaaattattcgtgtgagactgacagcggccgtacaaatggatagaaaagatcgtatcgacatggtcaccctttattgatgcaggctgatgactacgcagtagcagtcgaccctcagacatagacgactgttccttagcagggtgcaaccataactaaccttttcgcgcgcgcttgaggcgagattccatcctggggtaagggacgacgtggtatcacaaccgcgagtctgctcgttatggccgatgttgccatgacaagtcaccggcaagcattcggagacgtggcaaatggtgtggcgaagcaagatacctgtcgacattgtgaagcaaaagagcgcaatagtgcctggaattcatcatcacttcacggagagcgggccaggaacaccatctccaagcgatagaggagtcgtgtatgacaagttggtacattattattgggttgtcagaaccgtcgaacatctacttcttcgtagcacagtggtagttgcaccgagctgttatagcaccagctatcgaaactcgggggtcgcaggttcgagccctgccgaggaagaagttatctttttgctgtttaggcgctcgcttagaaactttcatctttaccgaccttcaccatcatcatcgcctttccttgtaccttgcagtctccgttgtacctttgcaggggcgcagtgggccgttcaactttacagtaccgacagcctgaccatcatgataatttcggagccgctcgacctcacttgtctacatgttgtttcgaccgaagtaggaaaaaagccattaccatcgggataaagctctccgaaccgtcccggcgtgtcgatcctatgtacactgaaaagtccgggctgctccctaccggattttacctccctccctcgctcgcaatcgcaagcgtggttcgtttgttgttgttgtttgaccgggtttgttgtgatgtgtggttgatcccgtagcgcgcagccatcgagtccggaggggggcagttcccggggtattttctgctcaggcgggcggggcgggcgtgtaccggcgtaggctggaggacgagattgtcattacgtcgtgctcatctcatcggttgactgacagggacgactctcttggcctgtgagaccagtttatcgcgtctcgaccggttgaactgatggaatgtaaacaaacggaatcgtaataacaacatctacggtctccttggctgtgatcgttgtcatctgaaacatgacgatccctcggcgatacacctgggaaggtccacgcgaagcacggtccggatatcactcgcaccgggcaccgctttcttttttcggcgtgtcgtctgcttgcctcgggctgggacccgcttgaggtgctacgtcaagggcgtcgtgttccgcggccttctagtcgcgggcggtgctgcccctctacctagtgtgcacgccagggggaggaggaatgtcacgcgtggagacacgcaggagacacaaacacacacagccaaccaaccgaggcggcacagggagggaggggaggaagggtgctttgcgggattaattgcgtttccattctcgattcttcgggggaaaaggtgtgaaccgaccggaaacacgcaaacaataatggatgtcggatgagggacggaccaagaccgggcaacgaacatgaataagaaaaaagaggtcgtcccccttcttcgtaacctcatccctctttgtgtcttttcccactcatacatcgttctcacttccggctttatcgacactttatccacttctacagctttatcaagctctgcctcgctacacttctacagtctacccaacttcgttctcgacagttctctctacacaggttcctttaccaggccaaacattcgacgcgacctcgaacgcgaccgaacgacgtcacctcggaccccattttcccctttcccccgcttaaacgcacgtaccggaccttcttcaccctcggtcgactcggcataggtttgcacataatcgacgctgcagtaccaatcttgaaccagcactgcctcggaattggatctttcgcagctacatcgtctttatagacaaagcttgataataggccttgtccggcatttctacattcttattcgaggataggatctatcacacgtaatcatccaccccgactcgacctcgcttacttcgagtcgtcgacattctgagactgtaccaactccgacagtccaacttcctcttgcacgacaagaaaaaaagaagggaaaaacattcttccgaccatgtccaactcggaaaccacccccggatcggaacgaaggaacctcttcttcaacctgttcatgttcaccatcaccggactcgtgttcatggtctacacgtgcacgttcatctcgcatatcctggccggactggctagcagcctgacggacgagttacgtgagtcgtcccgtacggtctgcctgtccattcgccgggactgattttgaccctatcggcacctcctttaccgtacgtagtctggctcgccatgatgtgctccgtcggattctacggtatcgccttgaaccaatcgtacaaggcttacgtacggacgaacggctcgtcattctccatcggaccctttaccatcctatccacctcgatcctcccttcctcgtcgacccatgtcgcacccccaaccccgatgaccacctcgcactcgtccccgcatgtgacgtttggtggtgggttttcgcccaagatggacggaaccccgggcatgatgtacgatacgaccccgcgtcagagtttcgacgcgaccgtctgcccgcccacgcccgatagcgtcgcttccaaccagacgcccatgctcgtcaccccgcatatggactcggtgtacaacaggccagtggaacaccaggcgagcccttcgaggatctcggccaagatcaaccggtaccgactaggaggaggggtcaagccggcgcatcacaccggggatgtcgaaaagggcgccgagatgtacgggctcgggatgggggagattgggaacgacgaacaatctcatggtgtccggccatgagagagaaaggggacgacgatggacggagggtgaatgcgggatcctatgccggtcggaaccggcaataggcaatcgtcatcgtccctccaacccgtcaccctcggtttcctaacccgaccctcaccccaccctacctctccggaaccccgcctataccaccttcccagttgacgggcccggatggacgacacggacctccgacgtggcgcgtaccatacacacacaccatggaatacacgcctcgtcgtatcggtctatacgacccttttcttttttacgaacacgacgagagaggggcgctctgctctcctcatgcccgcgcggcgcccgccgctaatccacggagacagacacacggacaatcatctagttgcgagttgtttactttttccctgcttgcctgccattacctatcaggatgtcatgtcatatcatatcatagcggatcggtacatatactatcgccatatgcgctatgccttccccactccgtgtacccgggttcttcccgcttgatcgtaatgcgcgctctatgaggcagtctgccttgcttccatctccgttccccgtcacttgtcggtccacttgcatatatacacacataaaaccacacagaaatcttgcgtccgccgctataaggaaccccgtatggcaatattcattcctcttgtccgcggccgggatctcagtaccgtaccatattggcggctatccacctgcgattggccatgaatgctggagcagtaggtcggggaggactaggagcctctgaaagactttcgtggccgtgcggtttcccaactacgtgatccgaatcgagtctgataagcgatcaatgcttcctttctcgaccgcgccttcccagacagacaaaaagggaatttcaacatgcaatttggcggggtcttgtgcattgaagctcctagatatcgtctcttagctgatcgggatgaatggccgagccaatcaccccttgacccaggtgattgagggctcagtcgatcaacatgaagttcgaatcaaggtcgaagagcatccttgtaaatcagcagtaggctggtcattcaaaccgcattcaagattgtcttcatgacgcaaggtagaaagcttgagtaacaaaagcagtctagtggaccgcaggagatctgcgcaaaaaaacgcaaaaagaaagcccattgtggggatcgaacccacgacctgccgattaagagtcggctgctctaccaacggagctcaacgggctaatccgtattggatatttgcgtgtcttttaaaatatatatattaacgtacgaaaaaccgagccttcgccgcttcgctttcctcctcgaccccttcaagcacgacctgacatatccatgttgctctcacctatgcatgtatcatcgcccatctccacacagcttcagtagtcctcaagtgctcaggaatacatacatcaacatcagactatcatgaccaccgccaccgaaccatctcggggtttcaagcggagacgcaattccatcaccgacttcgagcgatctcttatgacggctcccgtagccagtggttcgacctcgccccccaacggtggaaacaatgctcctacgaaggactctgccgctcctgctgaagatcaagatgacgacaactataccccttacgtgcccgttgctaagcgccgagcgaacctattgtcatcgctctctcagcggcatcaaccaacgaaggctgtgacgaagacgcctgaggatctcgctcgtgagcaagaagcactgcaaagagagcaggaggcggcagaggaggtacgtcgggagagagcacgaaaggagagaaccctcctggaggaggctcaggaggtcaagaagaggcaagccgagatggacctacatgagaccgagttcgagcgagaggcaaaaaaggaagccgagatcctggcggctctagaaaagcaacaaaagaagctggcaagtgccgccgagttggctcgaggtgttaactatacggagagtatcaagacgacgtaagtgtgtcagggggcaactctgcgttgaccagaatctgacgacggctaggcgtataggtggcaagcaccacactacattcgggaacggacggaggctcaaaacgacgaagtgcgagagcagcaccacatcatcgcagaaggagacgatattccccctcctatcgctcggttcgaggtgagtctgtcagcgagtcagcgttcgtgggcgtttcaagccgtgctcatgctcttgtcgtcatttaaggatatgaaactgcctgcacccattctgaaatacctcaagagcaaaggtatcctgaagccgtcgcccattcaaacgcaagggatccctaccgccctgcagggtagggatatcattggtgtcgctcagaccggttccggaaagacgctggccttcacgctccctgccatcatgacaagtctggaaatggaagccagattaccgttcgtccgaggagaaggtcccgttgccatggtcatctgtccttccgtaagtttgacattctatagacatctagacttgatcagcgtgctcacactgcaatacggggcgtttccagcgagaattggctcgacagacatacgaaggatgtgtggctatgtgtaaggtcttggccgagaaaggggactatcccgaaatccgatcgctgctctgtatgggaggaatcaatatggccgatcaaggagaagtgctcaaccgaggggtacatatcgtcatcgcaacgccagggcgactcatggatatgctggagaagaagaagctcaacctggagaactgcaagtacgtcaaccttcacaatgcattgcgattctcgacgtctgttgagtgtaccaccctgcaacaggtacatgtgttttgacgaagccgatcgaatgatcgacatgggattcgaggaagatgtgcgaaccatcatgtctttcttcagcgtgagtagtacaggggtgattatcgacctgtgacaacactggctgacccagacggaacatctctagcatcaacgtcagaccctcttgttctcggcaacaatgcctcgaaagattcaagatttcgcccaggcctccttgattgagccggtgctcattaacgtcggtcgagcgggagcagccaacttggatgtgagttataatcgttcacgccacgaacaaacacaatgagctcatgtatcgctcccttccttctccaggtcatccaagaggtcgaatacgtgaagcaggaggccaagatgttgtaccttctcgaatgtctgcaaaagacgccccctcccgtcgtcgttttcagtgacaacaagaacgaagtcgacggtgagtgccgatcgcgcgatcagaccggtcgacagtgtacttactgagtcccgcatacagacatccaagagtatctcttgttgaaaggagtggaagctgtggctattcacggtagcaagagtgagtcccgcaattcggctgaccgtcaccattacatgtccactgatggagtacgttcgcacttccaggtccggaagagcgagaattcgctatcacctccttcaaggatggccgtaaggacgttttgattgcgagtggagtcggttcgaagggtttggatttcgccgagatcaaggttagtctcgtcgcgtgccaagggccccttgcaagaagcacgatctgatcgaccatatctctttacttcagcacgtcatcaactatactatgcccaaggagattgaagactacgtccatcagatcggtcgtacgggtcgtggaggtcgaactggtctggcgacgacgtttgtggatgccagcttgaacgaggccatcttgctagatttgaaatacctcttgttggaagcgaaacagaagtatgtcgagccgtgtccgcattgcctgctttcagtttgtgctgacgttgatctctttgacagggttcccgaattcctcaagtcgatcgaagatccgatggaaaagtaccatgctgccggaacggtcggcaaagcctgtgccgtctgtggtggtctcggtcattcgatcgtcaactgtcccaagctggaggacgcacagcgacgacagatggcagggcagtcgggtcgggaaggtggtggcggtggcagctattaaggcaagggagatgttattgcaacattgtactgtctgctatcatgtcactatcgtactcgtgctctttgcgccgtcactgatggccgatcgccgatgctccagccggttacggaccagcatttccccgaaaggacgtttgaccttcctttacattttgacaaaaactcctttcccatcaaatccaaacagaatagaagatgattgaacaatctctctcatgatcttccatcaaatcaaaacaagacagcatggttagctggatcagcctctgccagaagagaccatataggcgaccaaagatcgatatgcaaagatggtgggaaacagggatcacgatctggcgggcatatccgatcaacgccagccatatcgcaatacgcaatagtttattatgcgagttatctatcccgctaccatccaaaagagggccattgcacctgcctcgactcaggaacatctcaagcgtctcttcgatatcctcattcccactcttcacggcggccagcgtttcatatattccgatggagtcctgtgtgacaagggcgaggtcaccaactttgcttcccacggcgagtctattgtcgaaaactacccactctcttttatcactactaccctcagtcaaaggaggatcgggttggcaatatcggccatttacgacaaggggaaagatggctttggtttgaaggatgtcggcgagagtgagcaggaagccgtgagcagcatatttttgtgaccttgaatcttccgcagattgcttatctttggtctctcgtcgacacaggtcaaggaagtcgttatggagtctccttgccaaagggtctcgaaccatgtggcgttgttgcttgtattgctagagcgcacatttgggtgcgacatagagccggtcccggaatggacccctatcttccgggcagtcctcgaagatggcgttatagcgaaggagccagtcacaggtgagtcttcgaccttttgaccaacgacgaatcctattgattgctgtctgttccagcttacggctgctggcgactctggctgctccataccctcccaactcaccgcagcttggtggacagcgccttcaaggcagctaccatcgcccaccataagcagttcgagattgtggccggaggcgaggaggccccgagggcgacccctccccgagttcgcaaccttcgcaaggaacggatcaagcgtatggctttcagcctgcataccaaggtcagcgagacggagaaaatcaccaggagtcgcggcggggcctataagtcttaaagttgtcatgtcgaacggcgatgtcctctactttaggttccacgacgattctgtcgctggtcttaacaccgcctgtcggcttatccctctcgctagctcgtaatcgaagtcattattgttctcagttctacatcagggtttcgttatcatattatgtctttggtacaattgtaacgtgcctagaaagtctcgtccatcaagccgcgatcgagatcggcaacctcctttgcgaggtcgaacatcgaatcctccttcagcgatcgcatgccaaagcccttttgcgcgttggcgatggctaagtttctgttgaccgtttgcatgctaacgctcgggatccttgcattatcggagacgggccttagaatgcccatatcggagccatgagagacgtttcggtgcttggcaaaaaacgaactatccgaattgcttgcgggcattgtattctcctggtttattgaggtctctaattcgtgcaagacttttccgtattcgctttgaacactttcgagacgtgcatttttctgtcgcgcatcgcgattgagtggggtcagcctcggctgcgaagggagagacatccgaagcagacacttacctccttgagcttgctgttctcgctcttgagaccgcgcactgaatcgtaaagcgccttgtagaagatctccttctccttggccctagcctcgagagcctgtaccttaggcagccactctgcttcgacgtcttcgcggagtttacgtgcaggctcgagcaaattcttctcatactcctctgcaagaacggtcgcgtcagctcgaagggctacctgcagactcccagaatgactgggaaactcacgcgtcatctcggtcaactgatcgacctgtaattgcagctcgctgatacggccgtccacatctgtgggccggagagcgagctctcgcttcagcttttcaatctcagtttgctgttcggctaccttggcctgagcgacgtgtgcctcttgttgcagctaatgagcaaaaacatcattgtcaacgacagaggatcagctggcaagaggcgcgttgcagactcactgaatacgtggatttgtcgtactcgatcgagctcttcgaaggactcgcgggtctggccaagccggatcgttcgacaacctcgtcctcggctacgctagacgaatccagaatgagtcgtttcagctcggaaagacgggtctggaatcgatccctctcttcgcgctatcacgaggtaacggtcgtactatcagccgctgagtatgattcggttttggacttgtattcacctgtgccatagtcgtgcgcttaggcccgttgtcgatctcgacagcctccgcatcccgagctgccaatttggcctgcgagcatccgtgtcacgtcaatgtcaaacgtcacttgtggactgtcaatcgcgcctcgaatctcaccttgagctcggcaatctcattctgatactgctggatcagtgcagccgggtcgacgacctcggtctgcttggcgttcaagacgacccgcttgatccccgccgcaaagttcaaggtcgattgtgattccgcgacggccgaatgagcggggttgatcgtgcagatcaccgagatccgcgcttgacccgagagggagggttgcagaagacgagtgctatgggacaagtcacggactgtcagtatccatagccaattcccgccccttatcaacacctgaactcacagcttcgagtcacggtaaggtatatgaccggtcgtcttctttgccgactgttccgccaattttgagatgacgttcttgagcgtcaagaggctgtgcaaacacccgcgacctccccgagatcaatatccgatgccccatcataatgatccttcttgacctcgatgctcacgactgattgatatgtttcccctcggcattcctctccttgttatcggtcgcccgctccgatccagccagatcgatcaagctgagtgtgcttattcgagtcgccttgttgtttcctctggcatcatcatcgcgggctcctttggctcgagattcgatgacctatatggtgacgagtgacatcgtatcagctcgccgttcgaattgaatacatcctcgagccaagactgacgattctgaacacgctatgactcctcgaactcctctcgttccaatccgtgcaacccgtccttctccttccctctccaatattcaaaaccttcttcacctctcccacgttggtgactaccatctctgtcaatccgttgatcctgacctcgccctcttttttcccgttcaagatggtcacctcgcccttgctcccctcgggtgccaacaggtctccgagcgcctcgttgtacagctcgaggtaagacgcgcggaggacccattccctggtcgtctcccgcttgatgatccggaagatctcttccactgcaagagggacgacaccgggagattgaggcgtcccggacatggtgtgcgatttcccggagcccgtctgaccgtaagcgaagcagagtgagttgtacccgagcatggcggaccggacatgagggagtgccgaggtgaggtaggtctctgcgttcgaggcggtcgtcgggaggatttggtctgtgacggcgatagaacgcggtagggtatcagcatgttggccgacactctctgcgggtttcgaccagcgtttcatgggctgacttaccgaagtgccaatcccttcgactcccgtcagccagcctgagcgtcctgggtctagaactcccagcgtccatcaaggtggaccacgcattgctgtcattcgggctcgagatgggtcggatcctgcagatgcacgaacgatcagccatcaacgtcagctgggatctttcataacaccgtctcggaccgagagtctcacctgatggtgacgagcaccgtctcgtcctgccctctggaagcgttccatgcatccaacgagacgtcatccatacccgcttgcaacgcctccatcccgtcttcaggcgaatgtagatcggtccgtcgggtcggtccaagggaatccaacatcgggagcccctcgtccgtcccttccccctcgccatcctcggacggagcgttcctcaccaatctcatcgtcgtgggccgatctccggaggctaaatgactctgattctgattctggttctgagaagacccaaggacgtgcctcggaatgggtcgaggagcaggcatatgcctcgtcctcgcctctggtgtcatccccgccctgatcttgggcatgggagcgatagaggccgccaacaccggttcatcatgctggttcgaaacggtcgatccgctcatatcggatgtcgtcgcactaggtcgcctcatcatccgggtcgaggaggatgaaggggtagcgttcgtgtttcctgatccaccgaagaaactacctagtttgcccttggctggggtcatgacatgaatccccctctccttgtaccccgacgacgaggacgaggcgggtccggaagaggattcggcgaaaggatctcggttcaaaaagtcatggttgactttcgagaccatcttgctgatcggacgaaaggcagatcgtttggaggaaggcgatgaggtgggcgaacccgaacgtttgttgtcatccatgaggttgtgtgggatgggcgagtgcatgatgagacgatgcggggtgtgtataatattgtattcaggtagagtctgcgagtctgcagctataccgagatcgatagtatgtttgacgggatggaaatgtaatcaacatatgatcatcgattccttcaacttggtagaagtgtgatgttgaatgaacatctatcattctctccgagggcaggcgaccaatcaccttcccacgcgttcgccccgtctcgacgacgacccaaaagccaagtcccagacaacccagactttcatgaaatcaacctcgaaatgtaccgaaagcaagacagggtcatgtatatccgtggcaaatacaaagacccttcgatccccaatcccaatcccgatcccggccggcaaacgtgaacgtaacattttgtgaataataatgataagaaaaaaaaaccaatcgaggaccacgaaacttccggatttcccttctctccatctgttcgccctttccgtgctgacatggaccgtccattcccccttcgagtatcctctctttcccacgacaagatgatttccccggtttccctctcgttctcgctcggtccgactggaacatattgatgtctcctccggctctggttgcctcaagctggccatgtccgttcccctgctctcgtccattcccctggctcgcccgcaggttgccaagaaatcgtccaaagaggggaatcgcgtcgagctggctgaaaagctttccaaaagtaatccgagagaaagaaagtcccgagtcgaatgcaattccagtgagatgatgatgatgagaatatagtgaaaacacaaagtgtggtacgggtggtggttgaatgcagcagaaaggatgaaagacgacgaggttccgtccatcgcgccacgcgatcctcgaatgattccccgttcgacgcttaacccgactttccggcgggctgctggttcctatggttcgcgcgagagcaaacaagtgcatactgatcagccttcccgtccatgacaaaagcttcatcccgatgccgaaaagaacagaggggatttgaagagggtgtaggacgcggtcgaccagaccattcgcaacgcagcacgaccatcgcggcaccagccggcgagttgttgttgttcagataggagcgaaagacatttgaaagatattggttcgtcaccattcccgcccgaaggcagggtaagtatgaactatgctaaagtaatcggtatcatcattggcaacgaggccgtgcagtgccccgaggtgcgttgcgttgcgttgcgttgcgttgcgttgcgttgcgttgcgttgcgttgcgttgcgttgcgttgcttggcaggtttggtcgtgttctttggtcgacacggtcggcggtcgaatcatccacatgtcaaagtcgtggttgttcaccaacgactccgatccaagaccggattcgagtggaggggaaagacacgaaaagacgacaccgggcgctgaacagagactcacatcttcctctttccaccgggggcggtggtgacgttgacgaatcgcctgacgtattggattctcttcttcgcacgtcccttgggtcgcttgggctctgttatggtggttcaagggagatcgagaggtcgagtccgagcgaggtgccgagttgccgttttgatggtgattgattgccagtttgagcgtcgtacagcaagccgtacaggtccgatcgatcgagcagatgcggagaggtacggaaagtccaagaatgcaaacgagacgagagcccaggtgaaagaggaggaagaagaagcaagcaagaggaaggtgcttgaatcagccttccgcagcttgcgacggctccctaccggcctggacactgtctctacgtactctcttgcttctccaccttgggagtctgcgacttgacctttccggcacgagcgagggatccgtgaaccttacccatcttgacgaactgtacgatcgagtaccgggagaacaggtagatgataagcctaggtgtgtctaagtcgtgtgtgaccgagaagaaaggaaaagcgtactagacgttattgatgcgttgttgtcgtgaagagccgaggtaggtaggggtgcaggtacggggtcgtttgttggggtcgatcttgttgacggctaggtcgacatgaagctgagggttcgggggaagaggcgattgcgtgaggtttggctgggagctggctgtggagggggagaggatgggggtggagaggggtggagagggcggcgcggttctgtttaggtcggagagcgtcaaggcggacgaggcgcagcaggtcaagcaaaggctgggatcagcttctgaatcgaagaatactggacgaatagtgtaaggctcacgtggagtgccctcaagaggctgtccgtgtacatggcttgcatcccgtctgcttgttcaagcgataggtcgaggtgagaagtctgtaacgatggtgaggaacagttgcctgagtggggcgtaatcgagaacaggtgaaagtagcaaagctcggcgtgaagatagatatcaagtatggctggacagacccctgcctctcgtcgatttatatttcattcaatccggattgaaccgacgtcgacacccacagggcggatgattgggtttcaaagacgcatttcggatgtaaaccggaggcaaaaagtcgacaaagtaaacaaattgacgccgaaacaaactaaacacgcggaggcgcggaaagtcgattgaataacatcgatcgatatgtatgtcatcagcgtttctgaaggcggcgctcttgttggattctcgcagatggtattacaatttgatatggagctgaagagatatttcgcttataatgtctcaatggagtcatccgatacaaggaagtaacagatcggacacgacataaactgagacggctgatcatacattccccgttcagaccagaatcaatatatagacgtaaactgcgacagcgatcggtccggttgaacggtgtcctcgttcctagaccggaacacccgacgcgccctaatcttgcagctggtaagataaacctccatagtcggggggacccgcttcgtttcaagcgaagggcctaggtcgacgaacccgagacggaccggtttaccgcagtgtctggacgactcctggggatgagattgatggcccacatgcctaaccacctcgaatagggataccatcatcacctcgactctgacagtattgggaaagatccggcgggtctacttcgaagacgagatcaggggtcatcgcaaactcagccggcgcaacgaggaggacttgcgctgcaaagccgtatgacatgtcaacgcgagtctgcttgcgatcatcgctcgggaacgggctgatagtatggggttagtcaggtcgatatggaccaccacgaacgtctacaccacgtcgccttctgtgcatggcatctctcatcggagatcatacagtcgcttttgagatggagactgttaccagcgtgagcgtctcgatactgtctctctacaccgaacccgcttctgacctgtcgtgcactctacagctgttccgccgagatcgtgagtcccagctagattcggacttacatgcgtaactgacgctcaacgtcgatcttcctaatgcaggtggttgtgtatatcgcatcggctatatcttcatcgtcgttgggcagtacgaagagcagcgacgacttggaaagagccgggaattggatgcaggccctcctttttgaagatttgatcaacagcacgtcagttatcggtcttccggcaggcaggcgtcgagaaggttccagaagagatgaacgactggacacgtacggtcggcaggatctggacttcgtaaagaccgacggggatcttgaacacggcaacaaaaccgaagacgggtggaccacgttaatcgcaccattatagatctagggctgatcttcctttggggaggatttgccgcacgcaagacgatcgaagtttttagcgggcacatcctgtaactattgatcaatcgatgtttgacggtccagccgacgggatctgggggtccgatgcacatgaacggatcgacgacctggacaagcatctttggagacggcctgacgaaggacagccgacgcatatcagtgggtggttgtcggctgaattttgcggacagtttgcgggcaagggaaagttcaagctcgatgccgggggtctgtcgagcacaacagagttgacgaggagcgagagtaccagggcaagttgcaacccgaggtcgaacgaccttcgagggcaagtcaaggagttgcaaaagaatcctcaacatgcttgagatgaacgactcttcgcttgcttcatctggcaatgactagggtaacatacggtcagtaaagaccactgtgaggtcattcggtcgccgatacacgtgcggtctcgcgtatacacacagatgatagcgcgttggcggtagattgatgagaggcagcatgctcgtcgcgcgcgaaagtccgggggcgcatcacgtcatcatcagatcctttcgtcgccactgaaattgtagaccacgagaacaactatctatacgtgaaaatccttataaaacaatcaatattgacactacaaccaccatgagcctagagttaagtcccaggaaacgtggtcgaatcattggcatgcttgaagcaggccttagccaaagggctgtggtgcttaggcagggagtcagtaaaggtgctatatacaggaccttgaagagggaaaccttgcactcgtctcaggctagccttcctagaagcggcagaccaattgctatggatgctagggaccatagaagacttgccagagagatcttagccaatcctgacaagccttggagccattttggatcgattttcaatgtctctgatgacactgtcagaaaggctgccaactctttgggtttttacaagagacacgagcggcagaaacccttcttgacccctaaggctattgccaagaggtctcagtgggtcaagacaacaaagagcaggactggaggcgcgtcatcttcactgatgagaccgcaattgagatgggattggacatcaccactaggtggactatcaggaaagcaggagaggggcacctgccccagcacctgcaacaaaccttcaggtcatctaggaagagtctcatgatgtggggtgccatagctcacaacaagaagtgggacctggtgcgactgagcatcccaccaagtgaagtgcaggaaaagggaaaagggatgaatggggaaaagtacgtcaggctcgtcctcaatgggcccctgaaacgagcggcaaggcagctcaggacagccaggtggcgggacatactggtggtagaagatggagctccttgccatagttgcaagctggcaaaggaggccagaatgaagttaggaatatcctcactggtgcaccccccatcttctcctgatctcaaccccattgagaacgtttggagcctgctcaaaaccaaggtatcacaactaaccactcgagccaccaatctggacgtgctttgggagcagttacaggcctgctgggccgacattgaccaaggatatatcaacaagcttattgatgacatgcctctcagagtcgaggaagttcgaaaggctagcggcaagataaccaggttctgatttttcgaaacgtttgtgatatctcttagctacctaatttcatgattcgacattgttcggatctatattgtgtgttttacacgtctttgaagtgcccaaacccctcttgaaatgaccattctcattgtcatgcccccggacttttgcgcgcgactagtacggatctagggaaatcgagacggggatgaggttgagcaacattgtctgccctgacaggcgcgatggacgattgtcgctcaagggcaccgtatcgatcgtcgcagatcttgggtagatcagttagcctctggacacggtccgcaagtcctcgaggtgatcagtcagagaccatggacgcatatcgttgcccgttgcgagatcggggttcacacaagaaaatcaaacgagtcattgctctgatgatagtgaaccatcaacattgggttgtggcattggcagttctcggtcgtgtagtaccccgagcgctcaggacggttctcgattgataacatggtcttctcactcgagcggcacgtagaatcggctctggggcgggacatccgataaataataaacatgcaacatgtccgcttttcgatattcttcgacgacggaaccgagtttgaaaaagaattccccgagtcgccaagcccccgcatccccggcccccgctgcataccccgaggcccagccagccagggcacgacaggacaactaagacacgctggtctacacctcgcaacctcgaccttgacacgaccacgcgaccccacacacctatatcgtcgttctcgactgggcgtcttcaacgtcgagcgagtcgcccccgactgcgggtccttcttcaacgtccagtgatggatgtacacgccatgaccacgccgaagaaggatctcggggtggtcaccgtcaccgacttggacgtcgagaaccgcgggggggacgatcaggagaggtccttcttgctcgagacgatcagctccacggcaaagcaggacgagggcgatgatgagctgctcgaagatgttgaattagatcgtcaggctcgacgatatggcaggaaaagggcccggtcgttggagattgtgatacggcaagtagtcgagtcgagtccggtcccggtcgtgtcagtcatcgcttactgacgtctaatcgacctcgacagctaccgccattggttgatagctttcacgttgctgctcctgggattgatcgtccttgccatcatcactgctcgtagctggtccaacaagaaagaacccttccccgacgactatcactggcgcttcacctacgcctcggacccatctcccgatctctctttggccgagaacaaccgtttagcaatgatcgattcgactcgtgcgcccacgagctcctatccggaacatttatcgccctccacaccgataatgggcatcaaccgcggtcgacctcgaggacagagcgagacgccgatcaggaaactaccttatggacagccggagcatgcaaatgcatacgtcaaggctcggatagcttggtgtcgggaccagcaaggaggtggtgatcacaagagagacataggggaaacggacgaagaaccttgtcatccgaacgagccggacgtggtgatctcgcaatcggactggtttgggattgcgattcgggggacgacaacgggggaggctgtttggtgagtcatcgcatgggggccgattggcaatgaatgatcagttgctgacggagcggcttcttttattttcacagggcgacgtctatagcaagtgtctgctgtaagatccatcggtcctccgcctacttgaacgtacaatgactgtttgaaaccttggcagatcaccgctctccactctttgcattataccgtcctctttaggtcactcggctggaccaaccccgacatggcactaatcaaggagttctaccgagaatatggcgacctcgtgcgattgatcatcgccgacccagatgccgtcgaccgttgtcaccgagatgaagactgcttgatgaagaacgacggtaccgacgggataccgaagtggaagttgctcagctttcattactgggaccagtgagtagtccaggtctgataaagcgagaccatcacgagcttatggctgatgtatctaccgcatgatagcccggccaatcccctcggtcgcgactggacactctccccacactggacgaatgggaatcgtttcgtctcctattccatcgaacccacttgtcccaaccagacgctcgtccccgctgctgagcgtgcgacgaacaggacctacctctttgccaagactcgggactatccccagccacattacaacgacacggcgtggacgttggacgatctgggcggcgtgatcgatcgcctcggcctcgacatgattgccgggatccttgacgaggacgacgaagagtctcgagatcacctgaagtcgctcgggatcgacaacaagggtcgactcgacgcaaacagctttagagagtacgtctcgtcgtcccgcttgttcatcggtgtggggagaccacgtatcagcccgagccctctggaagcgctctgtctcggcgtgccttttattaacccgatcgggatttaagatcacgaggatatctggaacgcgtccgcctggaacttgcagcattgggcgatacagcatttggagccgtgggtagtcatccctgtgcgatgttgttctacgaggcggaggaccgctgactcgatatgcacttgcgtcacccgcggtgcagaccctacgtctacaacgcctttgctcgcgacatcgcaggcctcgaatcggccatcgtagcggcgctcgcccatcccatcgattcgtgagtcgggcgtcgagccctgtcgcaagggacatcgaggctgatgaggatgtgctgcgccgccactagctttatacccgaatacatgacttttgatttcgtttgcaccgctattgaccgagttgtacgagacgattggcaaggaaagtatcgggctctcgaggggcgatcgtgagggggttcgtcaagaggttgtatgtatcgacatgacgagggtcacaatatcggcctcggaaaaagcatttggacgatcggtacttgccaagttgctcgttcttcaagattcgcgggtgacgtgaatctaagtgtcggcatggagtgaacgcgtccagcgaccgcgttccgaacgtctcaaacgtcttagacattcgaacgccaacgccacgaacgtgcgacacgactttaccacagaaggacacgatgttacgatccggtcacttgtacgacgtcgaggcatacgttttaatatcgaaaacattcgggtgctgccactacgttcggaccttgacggcacgataagggtcgtcactgaacctgggttatcataccaggtcgatgtcatatcggggacccgcttgacttggtgcggcaaagcatactgccagcggaagcctgaacgggtggctttaaccaggtctctctgctgtaccaaggacacacgcggtccgcattcggtatccgatcgagacggtgacagtcatcatggaccgagcgaacgccggtcctctcaccgtctcgtccctatcggcctctcctcggctcgacccggcttaattagaattcgttggcttgaagggttcccgtttaaataacctactagtggatcacaaaatctaacatacatccacacatgtaccagcgtacgtcaaccgcccgaaaatgacctctcgactctccttgaccgaaaccggtcgacagaacctcgatcgcctcatcgacactgccgtgcagtcgagaacggttcctgcggtctttgtagcgctgacggacgcgaacgagacgatctactcgaagtgtgccggacaggtcgattttgatgatccgacccggggatctgtcaatgatgataccagtgagttgggagatgtacgggccgtggacgtaacagtctcgacgtttcgatccgccgaataggaagctgaaacgggaaggacgagcgaactcagctttacagatgttctcttctaccaaactcgtcaccacggtaagctcgcccggggtctcatgtttatcgcagaaggcagagaggctgaagttgtctgtgcgcctgctgtgtccgtatccctctccttgagccaggtcgcctgtcttcaactctgcgacaagggcatggcctcgctggacgatgccgatctcatccgacgtcacgtacccgagctcgaagctacccaggtaatcacaggtctcgatgaactaggcaacgagcagatggaggacgtcaggaatccgatcaccctgagattactgctcagtcatacgtcgggtgagcttcgagtcggcggattggaccaccacatcggacttgagagacaaagctaaccccagactacccgtctggtctcggcgccgtcgcttagggttctgctactattcaaacgatgccaacatcacacattggcacgacaagcacgggttcgactggggtttcatgaaggcgaataccactgtggctcgatatcagacccccttggcgtttcaaccgggagccaagtggcactatggcacgggaatcgattgggccggcatcttcgtgaccagagtcaccgggcgatccctcgaggactattttcaggagttcatctttcgaccgatgaagatgaccagcacttcgttcctaccagacgcctcggtcaaggaacggatgatgtccctgacccaaaatttggacagtacgggaatcaccgcctatccagacaacttcaagtcgatcccgttcggcctcgatcgggaatccgacccggacaaggtaggaccctgttttgcgggtggagctgggcttttctccacagcgctggattatctcgccatgttacgaggcatcatcgccagtgccgccaacgacgatgggtcctcggattcggccctgctgagctcgggatcgttcagggaactcttccacgattcgatcccctcggacgcggatcggagctacctcctcgaggccatgaccggtcagacttatcatgatccgatcctgttgaaagaaaaggaggacggcatcagacggacgggccacagcgttgggcttttgctcaactttgtcgattcgtgctacggacgcaaagccgggagtggatgttgggacggtgctgcaaagacgcaatactggttggatcccgtcacgggtctcgcggtgagtcgggcagcctacgctattctgcttaccgacagagatatagcagcgaacctaggtcagtactgacgtgcgtttctaccccttttcgtcaaatcttagggggtttgcatgaccaacattttcgcacccaatccgaacccctttttcaagctctacaacgacgtagaacgcgtagcgtacgatgccctgagctcgcagtagtatctccgatcttcaattcaggggccctctttgcactcgtcttgatttgtaacaagcttatgccctagcgaaatcttattgacatagcgaaaaatcccgagacaaggaaaagtcagacgccttgtcaacgcgtcagatgaccagaattggtgaccagtctagtgttgctcatttcacgtccttccggggatatcgacccgatctggacagcttttctatcatgcaggccgcaagatcctgatgaattgatgaaacgtcttgaaaacgcaacttcgccacccacctgcaagcgctacatgcgagcgcgacttttgccaatgatgggctattcgtgatatgcgctgatgggtcgatgagctagtacctaggtagcaggtccgtacatgtcctcatcagcagtaccaatcgatttcaagacgttcgaaggcatataccattgattatcctgaaacaactgaagcaaacaaaggtaacgatattgaatgagatctggatcagatacgccagatatcggcgaggcgaggctacaatctccatgtgtttgcattcgatcgccgtcttgaacgtatctctcaggcttccattgctatttatgatagaccgatggccgtcgtttataccataccgggtgccaccgggacgttttcaaccatctcaacgtcgtctttctttcggccatcgtacgcgtcctgctccgtcgccgtttccgcaaccgaatgatcttgcggcaccacgtaacggcccatgcttcggatcttttataggcaaacaatccagtgttcagtatccaacaagtacgagacgagcctcacgctacctgaacagactcaccggaacgccgtgatcgaacatgtaatcgacgtgatcgagcggtcgacccttgagctcgggaatgcaaaagcaaacaaacacgaacgccacgacggaaatgccgccgtctgcaagcgtcgttgtgaagggtcaaccggtttgtcgcttgataagatccgcacaatggcttacacatataaccgatcttgcctccgagattggcatattgagggttttgaatgtacggactgacgaaaatgagcattgcgttgaaggctcccgatgtgagagcggaccagctgagcgtatatccacgcaactcgatcgaaggaatctcgaaagctgccgtgttccccacgttgtaccaggttacggtgaatccgacgaaccatagcatgactggcgcgatgaaggcaagtcagtcgctgcgtacttgggtctcgagcagacggcgcccgatccttgttactgactgagcgcgatgcaaacgttactgctggctccgacaggattaggtatcgccgtgagcaaacccgcaaatcccatcatgcaacaggccatgatgccagctccgacgataagggctatcctccgtccgatgacgtcctggtaaaagggaccggtcaaagaacaggcaaagacgatcgcatagactgtcgtttggacagatgcggtgatcagcggtcgatatttggaatgccgtggttctcgtatcattacctatgacgatgatcttgaaaggatccggaagtcctatctggatgaaaaggattaccatgtagcctaataagaagttaagacctgtccccgagatcgcacagtcagtctggtgatggcgctgataatgaggtaggcgaatgctttacgtaccttgagccaatcccaaaacctgcaaacccatgacgatcagggttctcttcaagtttagtcctctgaaacagtcgaatggcttggtctttgagttactggccagctcaaaagcggtgacgatgccgcgcaattcatcttcgacgtcgcgagtccggatctgctgcagattccttcgcgcttcttcgacgcgacccttgctgaccaaccagtgtgggctgtagtcgtttcgtacatttagcggatgacgaagcatgagcggcgacccaggaatcctactcacttttcagggagccagatggtacccacgatcgtcatcaacggggtggtgaattgtaggccaacctatgcgagtcgcgaaagtcgttgccagatgtctgttgaagccctacaagcgtggctcttcactgaactaacgggtatcatccagatcatatcgccagtctttttggacagcccaaagatcaccaaggcggcgacaacggatgccagggctgcaaagtttgttcggaaaaatgtccccaggcatagagtcagccgacgcatgcgaggcatcttcttcaccggatagacttgccgacgaaacatgtgtaggaatttactaccgctccgcggaccgcggcgggtgagcagttgctcagaaagactggaatgttgaccgaattgaggccgacagccagggtcacgatgattttcccgccgaccagctggtagtagcgagctccattgacgccagaggtgatttggacgatgcttcccaagatgacgataagggcagactgtaaagccaggatgtgaatctgggtcttttcaacctgtcatccgatgcagacttacaattgcaaacgcgattcggtatccccacgcgctcgctatgaaatgtgctgcgagagcgccgacctgatcgagtcgtcaatacatatcgagagtggcattttctctgctcagagaagagtgctgatgaacataccacggtgccaatactcgaagaagcggtaccgatcgattgctgagtcgcactcaaagagttgaatgcaagtccaccgggggtcagagtggtggcatctccgaagaatgcattaaagtagggatgacccaagattgcaccccaccagttgactgattgcgcgcggaaatccagtcagctctgagcggacccacatgggttgtcattcttgaaggcgacctacgatcgtaaccataagtgaaagctccgatagctgagatggcacagagcaggaagaacctgcccgtgacctctccgatcatttgcttgtaggtttcccagagtttcattgtggacggctttctgctatcgtcgtatggggctagctgggttgcgattgaagcggggctcctagtcatgtatcggggaggttttacgccccatcctttctttaaatacgtgaaggaagtcggttcaaccgcgtgtcgtcctccagatgagtctgcccatctatttgaccgacccggggccgaggatcggttccgaaagagatttgaaacggaaacagagacagctacgcatatggaagcgaggcagacccggacgatcgtcggaggctctgctatggggtgagagggttggtctaggggtattgcgggggggggggaagaaagggaggcgactagggttagctattcgtttcgtacgggatctccgtggggccgaggtctgccgcgccgaagccgagacattccgaagcgcgagcgcgcgccacgtgaacaagtataacagacgatactcaggtctacacgtccctcttgggttctccactcggcgtcaaccataaccctgcaagcagactcgcaccgcagatcacatcgatttatcgacgctttctgggccaaacaccaaccacaagttccgacatgtcgcatgaaccctctcccatcggcttgcccatgccagacaccgccgaaaccaacccggattatatcttcactttcaagtcgatcgccggagtccagcgcgggggatgtcgcgcgctcgtctggttacccaccgagatttgtcaagatcagaccctcccagtggccttgtaagcagatcatcgtggcacgactcaggttggccaaaaactgatttgatctcacattgtatgcaggttgtatcacggcggcgggttcagtatcggatcgccgcctgaagtgccctatcatcaagtccgatacttgctcgagaaaggggtcgtcgtagtctcattcggttataggttgctgccacagtatgttcatcctcgtctccgaattctatgtgtatcggagtgatttacgaacgatcttacttgaacggccccttcagcgtcggcatcgatgagatactagaggatctgctggactcctatagatacgtgcagggccaattggcgaaagacttgaactccgtaggcgtgtctattcggatcgaccctgctcgctgcagtgctcacggatggtctgcaggcggaagcagtgtcgtctaccttgtgagtataccttgtctcgtccttgctgaatgtgtatttgccacccgcgcaagccgaaaacggcggaccgatgactgactgacagatcacgtctcgtcatcaggcttccgagatttcgcggcacaatgtttctgccagcgatcaagatcgtctaccgcctcttcgatgcatcgtacccacataccccctggtccaacttgatgtactgtgtaaagacaagaccggatgggaccagaagctcgagtccgaccaagcgctgtcgcgttgttgggccaacttactggcccagccctgcctcacggaattccgagtggatcttgggaagttcgcaacgtgagtattccaggaacacggctcgatcgcattcggtcgtccggtggctggctgatacgattaggcatctcgtcagcgctcagtctgtcgtgtctggtgatgaaaccgcgcttgctggtctagacctcgacgactacagtagactcgtctggatttcgcacgtgacagccgacaatagccttgcctcttggctctgcggaacagacgctccttatcccgccaggtatgaaggtatcaaactggtctctgcggatttccccccgacctgtgtcgtcgccgcctcggccgataccttgatccctcccattcagagtcacaatctcgcccaagccgtccgtgcttgtggcgtggaagcggtgctgttcgaatgcgaaggaatgattcatggccaggcggaggctctcgccagtagtccagcgtggccggagaacaacggatggtgggagtcggccatccgccctagtctggactttgccattcgcaagatgaccgaggtgtgaattgtaatcagtagcataaaagtgtggatcttgaagaccgctggacgagtgggtgtatgagacgatcgttcctccaagcatagcctatttaccttgtctgagtaagaagggtcgagaagctttgtctgaccgagaatggaagagtagctttggatgggagagaaaggcacgagaggcaaggatcttttctgtctgctagagggagctacgcgatcaaactctcaagagacagccactgaacacatatggatctcgagagttcggctcgttgatgggctgagtcgtaatagccaaatttgctgctaccggtgtgtggaaccattcgtagcggaagtcaatgcttgtacaacacgctacgtcaatcggttccgaggaactctgtcaaacgccgtctgagatctttagcttcttggagccagaacaacatcgcaaatgcatgacacatgtccggatactatgccatgcgcatagatcagtcaagggaggaggggtcagtatgagactttgtcagatgtataaggaaatccgaacggcaaagcatacctcgcgatactcgtactcgacggctcccagagtcaatcgttgcagtgcggcaacgactcgacgattccctatacaagtcaggtcggccgttcctaccgccgccaggatacgaagcggtgatttgtcgtcgatctgagggtggtcatggtattgttgcaagacatggcaatcggcatgcaggtcgaagcggccgtcttggagagagtacttgagcgaatgagcgggttcggcaagcgaggttgcgtctgcgggcagtttcacgtcgaattcgggaatgccagctggaccgtacgcccagagcttgactccagccaggacgacgtcccggttcagcataatatcctgaagggagcggatttctgcgtcagcatctactatgcgacgaaaggctttgggctcaagggggactcacttgtcgacccaattcgacctcttcttccgaatccaaactcagaccgagcgcgcccgacaccgagatcatcttggtcacggctcgacggactcgacgtatcttttccaaatcccacgcaggacccggagatatccccgtgcattcggcatcgaacgcctcgtcccccaaggccaatcgactcagggcgagcgccagcctcaaggcgatccatccgccggcggatgaacccatgagaacgatgtccctgccgacgtaccgcgaatcctccgatatggaaatcaagaggtctatcgccacccgaatgacctgccctgcggtcgcgtagggtgcgagcgtatacacggggaagacggtcggatgacccgtctccttgacgagcaggttgtgggtatattgccattcaatcgggttccactgtgctcgattgcaaagccaaattaggtcggtcgaatctagcagcccgccggggcgacaaccgccggcaaagagggctcgtagctcacctgcccgtagaatccgcccgaatggaagtagacgacgacgggcttgtaagccaatccgtccgttccgttaccagagctttgagagcggaaatgatagaccggccagtgatctccgatcttgccaccatcctccttgcgtcgccctaggtgctcgagcgtgtgtgtagtcgtcctgtcatcgaggactcgagcgggaggtgcaaagtcttcagcccacttctccttttcatcgcgaatcttctccagttcggactggacagacgtgtttctcatggctcggaacgccagcgagaggcatttgttcgtgatgttactcttccaggagatcatgctgctcggcatgtatggtgggtaatcttgggagaaaaagtcgcaatgatctccgaaagggcgaccggtcgatggtcgagccatcaggtcgagccgattcattatagttgacctgtggctctccggcgacgatgaggtcgacaacgatgatgcagacctcgagaagaaggcagagacccatccgtccccgggctcgtgccgattgcggaccgagctctcatttatcgagccgtttcgtgaccgagcaggtcgtttccggagtttcggctaaatatctcgacaggccctctcctacaggacaggccctctcctacaggccccatcgtgactaatggtgctgagagcggtgcaactgcgtgactaagacgatgttctggttgatcccctgaacgaacgacccggtgcacagtgagaatctgtggggtgacagcatcggttgttggttgtttcccaacttgatcaagcaagttacttgcttgtcaacacggtcccttcaggaagcaaaataggatgcaaatatctcgcttggttggacttttcgcccttcatgtctcggactccaaagcaagaaactctccgatcattagctgatgatcacgcgatgctgattgatcaataactattcgatttaattgataggggttaggggttaggggcgtccgctcgtgttgaccccaccccccgatcgtcgacgcgctcgcagcccatgaagatcgtctacctgaacgaaaagggtggattgtttcacggcgtgacgggtcaaaagttgagcacgatcaacttggacgaagagtacgacggcctgatgaaggaatcctgggtaaagtacgggaccaagctcaagctcagggagatcaaggaactcttggacaccctcccccgaacctcgtccgtcgccatcatcgccaccgacatgctccaaaaggaactcttcaccgacgccggtgcggggaccttgatccgacggggacacaagctctacaagaagcccgccgaagaggccatgtccgccacttcgctccgacaggtgttcgaggaacgcgaccccgacgtccgatcgggcaagacgagcgtcgctgaaatcttcaacaagttcaagtcgggacccaacacggtctacggcgacgaaccgttcgactgcgtcgccgtcgtctctcatcccgagggcgagaccccggtcatgaccaagtttttgccgtcgcgcaacggtatcctcaacaaggtcgtcgacaacgtctttgacgccgtgaaaaaggatcacaagcgattgttctggaccgccaagtcggacgacgagaacagggcttggcatttcgagcgggccgacgggtcgttcacccgcgccgggaggagcttgttctggtacggcgttcaagacgtcaaagaggtcgaaaacatcattcaagggttcgaaaagacgggcaggatcgagcgtgtctttttgcccgtcggaccttcggtaccgccccaccgtcaacagacccggggttacgccaccagcgcccggtcgttttttcaggttgggctcggtaatgctcgacgcggttatgccaccgccgccgtctctaccgagcccaaacgggtcgccttgatcggcgctcgcggatacactgggcaaaacctcgtctccctcatcgacagccatcctcaccttcaactctcccacgtctcttcccgtcaactcgcagggctccccttgccagaatacaccaaggacatgatcacgtactcgaacctctcgccggaacaggtcggcaagatggcagagaacaacgaggtcgacgcttgggtcatggcgctgcccaacggcgtctgtaaaccgtttgtcgacgctatcgacgcggccgtgcccaaggggggtaggagcgtcattgtcgatttgagcgccgattaccgtttcgaagcagggtggaactatgggttgccaggtgagtctcgcaggtggtgatgccggataccccatctccctcgatgaattaccagctgacacggtattctcgatcgttttcgctccctgcgtgtccctctttatgtcactggacagagctgtacgaccgctcggtcacccgatcggccactcgaatctcgaaccccggttgctacgctaccaacacgcaaatgctcttggctcccttgttgcccctcatcgacgtcaagaacccgcccagcatctttgggatcagtgggtactcgggcgcggggaccaagacgggatccaacgatgagcacggtcgaccccagaccgtgcctaaaatcgtgagtctcgagcgtgacagaggtcggcgccgcgatgcgcatagaggagaccgctcaccttgggtccgtcccgtagaccggcgaggatcttcgtggaggcgtacgaccttatgcgttgacggatcacattcacgagcgagagtcgggctaccaactctccaacctgatgtcgtccacctcggaaccgctcaaactctcgttcgtgcctagcgtcgcgccttggttctcgggaatcatctcggttctcaatgcaccgctgaagcaagaggtacgagcggatgacatctggaagctctacgaggacaagtacggcaacgagcccctcgtcaagattaccaagggcgttcccgacgtcatggatgctgccggcaagcacgggtggaggatgggtggcgttcaggttcacagcagcttgaagcgcgtcgtcgtcgtcgtaagtcgcaggtgtcgagatgatggtgtctaatagcaatgatttcggtgctcatactctgttaccctgtcttttgttctggtcacagggcgctttggacaacctgctcaagggagctgcgactcagtgcatgcaaaacctaaacttggctctcggttatgacgaattggccggtatccctaaagattctctatagatagcggatcgatgacgacatgtctggcctagacctacggaaatataaatcatgcgaacaaggcaaagacgtgccggcattatcatcatggctctcgatgatcggtgcagaagtccgggttgcaaggctggagctactaacattcagagagagctagagatgactgcttacccttgatccttggtaagcagctcggtgataccatgagcgcaaaaaaaccctgcatgttccgatgatcaaagggagaacttaaggccatatcaactagtcagagtctccctattaccaggaatgagaatatgcagagcggggcccgcggatgcaccacgatcatcttctcgatcgaacagtttccgggctaattcaccatgcaggaactcttgcagacgacgcaagttttcggacccctcaatacctcgataaaacacgaaaaggaaaccaaggcgagctgggcatgtgcagcgtgagtcgcgaggaagaacaatttgacctccttcgatctgagaagatcttttcagtcaaataattttgttacgagccgagcacttaccatccaaacaatagtggtgtagtggtaacattagccgttgccatcggctagcactcggttcgattccgggctattgtatatctttttgcgtttttaccgtcgtctcgtcggcatgcgaggctgtacctttttgcggggtccccggaccgctttcttccgcttgattgctcccggaaacacaggggcagctcagggccaacagggcgatgatcctctgaaccagagtgaatggctcgtcggcgtccgctggatcggtcgttgttgtgcgagttgctgcgagggaatgttatcgcctcgccatatttatacatccccatgccttgacccacccgaaccattttactttttgagatcgttcgttaccccccaacttgacgtagtgacggtttcagttggcgctcgattccgcatcaaataatctatcggcacggtcgagttctatccgacatcggatgctgggccccttactggcgctatgtgccctgaccgacattgcgttcgctcagctcactcccgccgtcatctatcaaccgcccgatcctatggagggtgcggctgtcaccaacgggacccgacctaatcagcaatactcaaacctgctaggaaatgctctctggttttacgaggctcagaggacaggcaagttaccggacagcaaccgagtggcatggaggaacgactcggttctcgaagacgggtctgactggaacatcgacctgacaagaggatactttgatgcgggtgagcaagggatgtccggagagatattaagagaaaggcctgctgattgacgtctcgctctcttcaggtgactattccataaactccttcaatctggcaggggtgagttgaacctgcttacatcaggacccatagcactgtgactaaatccttgcggcgagcgagttcagactctgtttgagatctgttggggagtgagatgcatgtttttgcaggcaatgaccaaggagggatgaactaacttgtttgatctttctactaggccacgatgtacggtccaggatacgatgctgcgaatcagaccgcgtacctcgatcaaatgcttcgttggggtctcgactgggccatgagggtaagtacacctttttgacaacatactcgaggttagaccattctaaattagacatctgcaatcaggcccatccgcaaccgaacgtcatcttcgcccaagtcgggaacctaagcgattccgggacttattggggtaagtactgcgctgaccgatgaccgacagcacgctcgaaggcaaggcaagctgatcgcacatatgctatgtcaggcggcgatcaatctataccgacccccagacctgcgatccctatcaatgagactcagtaagcttggtaaaagctagaagccagctcgaccaacatgggttgataaaggacgtttcctttcatacagccccgggacagatttggcgggagcattctcttccatgttctcgatgtgctctttactttactcgccaggagtcaccctaaacgcgacggctaacgcgaggtcgccggccgggatggatgatgccgagttggcagctcagctccggactcatgcggaagattcgtatagctttgccatgaacaccaccaaggttctctatcccctaagcgtccccgatgccggggccggatataatagctcttcctttgccgacgatctcgtaagtgatacggaagactacactcatttgcaagggtgactgaccctctcctccatcgtagaccttggcagcgatatccttggcacttgtcactaacaattcagcatactacgtcgaggcgctggatctatacgatacgtatgccttgagtaccatctctggtgctatgaactgggacggcaggaacccggcagtcttcgtgagtctggttgaggccgccctggctcgaccggccttggctgcaggtgctggtctcgccacaaacttgaccggatggcaatcccaaatggaagcgtatctcgacggcatcttggaaggcaagaagtcgcgaccgtacttcactgacggtaggcatgaatccattggtcctcttagaggggctccctgctgacatcgggttgaggacaggccggctactgtggtacgagggtgactcggactctgccagtctgaatgtggcgttgaacgcagcgatcctcttcgatcggtatgctccgtactcgaacgtgtcatggaagccgcagcaataccacgtatgtcattgctcgggacggtggaatgaccctctctcatcctctggctatatactgcaggacttcgctttgacgcagctagactatgccctcggcaaaaaccctctgaatggtgagtgcggcaatattagacgtacatcaccgcaagctctgacgcatctgtaacgcttcgtagctgtttacgtcgttggcgctcataacaactcgatcaaaaacccacacagctccccagctagtggcgggaacagcgtcaagaccatcgatactgtccctgagactatggcacacattctctatggcgcatgtgtaggaggtcctgacgctcaggatcgatactgggatctaagaggaaactatgagcgatcggaaatcgctatcgactacaacgcgcccatcctcacactcgcagcatatcatgtgatggccggcgatcgcgatccgttctacacttccttggcgtctggcagttatgcgcctaccccaggactaccttgcaacgatgaatatccgtgtggtggcgatgacggcggcagtggcggtggtggtggccttagtaaggctgccaagatcgctatcggcgtcgtggtcccggtcgtcttcctaatcggtttagccgttggggtctggctgtggagaaggaaaaagcacagacgatactgagcgggatgttgtacattatactaggttgtaatgcatgcaagacgcagggccgatggtcacagcccacatgtgataggtctccaacggcctcgacgctatctctcgcttctccccctagtcgtcaagctcgaacgtggtcgtcacctcttgagacgggcgatatcctcgcgtgacaattccgcatagaatatgacacattttttactctttagtcatcattacacgacggacatttggaccggccttgcgatccagtgcataggtaaggcagttggtcgggaagacgacacgacggagtttcatcgaacaagtctccgcgaatcctctcacccagcaaaacatactccatctccgcctgtgcattgtgccacgctcaatacactcggtggtgggccttggatcgtgattgaattcagatacaggcgctttcttggctgatctgcgtgccctcagcttcttcatttgcattgccgatctgtaatatggaccaggtccctagtgctactcaagcataacgtatcctcgtactgttcctcacctgagggaaagcctcgtatgtgcctttaaatacgatgtggatcagtcttcacggacggacgatcagggacaaccaatttaaatctgccatcaactcgtcgtcagtcccccccccctttttcccggatgtcttggggagatcaagggctctcagataattgcagcaatatcccttgcaatagtcctctgcgtaaggccgatctctccccccttcgatcgacacacatgaagaggtaagctgatgatacagactgtagtcagcgatgatggaatcgcgataccttcccgttacgccgtccggcaacgcgaattgactggaactgacgcactgactcgaacagattgcctacaacgtgtgaaatattagcggcggccgcaacgaagaatgacggagatagcatcctgcatgccagctagctttccagcttcccattcctacacatgccctcgaggtttggaggcttcagaagcagtcaataaggcgatcgagagcacgcctgaaacgtgaaaagcaaaacgcgccaaaatcgcaaaaagatatacaatagcccggaatcgaaccgagtgctagccgatggcaacggctaatgttaccactacaccactattgtgttagatgaaggtcaagccgttataagtttatatacttcacacaagtcacagcctagcagaaccccttaccgttcgatgaccacagtctcgcaccgctgacatcttctcatgggtcatacatcatcagactgtcccccgctgaggtaccaatacaacatccaggttcctgagctgcttatatatggccgctcctacgtcttcacatcaacgtctgttgggctccgcgcagagcgaggtacaactgctcctgacccggaccctggacgatcgatcgacgaatggtagcgagcggaatcagtaccgagtcccagcaaagtcgcactaaaaggcacagctctcaccatccccctgatcacatccagcacttcaagccctcggaagtgcagccttgttttcggatcggtatacttcgctggtaaacccgtgatgtcgcagtatttcttggcggggaggagagaaggcggtgcttgtgatgtgaggtctgtctcatatttcatcttgcgtgacatcagccgattctgggctgggccaagggaggtggtgcagcttacaggaaatgacctctctttttggcgggatggagggatccagaacagccggagtctcggcctgtttcttgtccatatccacatctccttctgcttcgctcggggtcacggactcttcctccatcttcttcctctttcccctgccgatcaggttggctcctctaggtcgtttgaccttttccggcgtcgccgtcccggatccttcgcccccgtccattccaggcaaattcatcccccgagtttgttccatggcaaggatctgcttcgcagtcttctttgtccgggaatgcttggctttgatcgcagcgtagccagggtttttgaaaggtaatgggttgtgtacccattcgtactggttgatgacatccgactgaacacaggcaaacaagagatgagcttccgggtcaaaaagacggggagactggcaaagactggaataacaacatacgctgccaggctgaggggtaccttctggggtatctcgaggtgtaccgacggcggatacgaccgactttcgcgaaggaggaggaaccttcttcgctgtgggcctgcaagttcagtgactgcgatcagacagggtcaccccaggagtggtcatgaaacgcttcacttgcattctaagagattagtatagaggcgttgtgtaataaaggatcgtccacgtacaaagggagacgggtaacgttgtcatgagctatgagtctcgtgaacttgtccgagatctctgtcgatgtgaaccggctcagtctgcttccgagataaatatcgtaattgtcatttcggaagtaaatgatgccgtcatcgaaccggtttcagccgagatatgacgatttcgagatcatcatcaaatagcaaatagactcacttcaacctgatcgatgatgacccaggtgcatcttgaagaagagtcttttccagatgtattgttcggctgtcagatctgccatcttctcttagtcgattgaacctcaaaacccgtcgagatgctcaacgcaaccaggccgaggaggccatccttgacgactgctcagccggcggattccaatcccacggcctcgttccgctattctacttcgcgtcctcgattctccaccaacccatcgaggcgcacttcaggcagtcaggaatctgctcgtccacctcaaagcggagccagaggaatgagtgtcgacgagccccaaaaaggctggaccgagggacaatatcccggacccccactccccgctcgcccgggtgcgggattgatgcaactcccgccgaccccggcggatacatctgcctcgggacatggatctgccaagacgactggcggcactagaagcagtagtaatactggaagagaggctgctatcagtcatgctaccactagcacggatagggctgcacccatggacgtggatacctccggacggacaagttcgtcacgcaccaatcgtcggcctcttcctccgcgaccgcacccacctgctgtgagcgagcttgctttccgtattgaccaaaaaaagtgtctgatagccagcgtgcgattcatctaccacagatggatcaaatacctgcatgggagcccgatgtcaaggctcacattcccccaaacgtcacgctcgattcgcgtcaggcggcttacgcacaacaaggcaacccacctcccttactgcgaaccgccattgacgctcgacaagaccctaaaagagatcgagtaggtatgctcaggaggcccgctgtcaatggaatcgtggtgctacaagaagggccaaagggtggaggaagcctccgaggttcgaaagaccgcaaaggaaaaggcaaggtcgagatcggcctgggtacggagaaccgaggcggaatcgcaggggaatatgtgttggatccctcccttccgttttctttgcccgacgacgctgtcgatctgtctcgaagccggagcgatcttcaaggaggaaccaaacgtaaacggggttctatcgacggggagagaccttcggccatattcagaaccgaaggcggcgatgtcgatctgagattaagcgtcgtcaacgaggagacgatgagaggggaggatatgttgagtggcgcggatgtgccagcgaaaagggccaagaaagcacgtatggaagtcacttccgtcagaggtcatgttcgagtggatctggtaagtgctggggtctgttgggatgtgcataggaagacccgactattgacatatatgccgacttgcacgtccctctcatgctacgcaggtaaaaatcgacaaaggtaggtcggtttccatcgagatttcgagtcgggcagggaacctgttcatccaaatgttggtcaaccgggccgaagagtataacgatcaccgctgacttgccggctcccggggtcatccagtcccgaaaatttcagaggccccatacactgctcgacatcggctgtccagcctaccatcctgcttccttccatgagacaacgggcaaagattttgtcaacccaccgaggcgagaccacatggtacgtgacgagccggagtagttcgccagcatggcataacagctgaacggtccgtcgcccgctagctaccttggaactcctccgcccaaaaagcaggatatgacccctctgctaccgccacggaggttctcgaatcgactgcgcgaaaaatcaagcgggtcatccctcaccaagatgccggagggctcgctaggcaaccagagccagctgtacgattctcctccccctatggaggtagacggtttcaggatgccttccccgtctcaaatggcacattccgctagctcgacctttatacctatgtcgaatggtattacaggacaggaggcgagcaaactgaagcgaaacgctgttgccgggtcgtccaacgcgcctcaaggagatcgggaggatgctccagaatcatctttatatttgtcctcctatatgggggcgatcactctggggatttatggacgagaacctgaaagcacatttaagggtgcaacgacgctgagcgggttggtgcagaatctcgggggtatcaagggcgagatgaagagaaaggtcaaggaaaaggttgggctctaggcgttcagccacggagttgaaattggtgcacctggcgttgaacgacatatacacgacatgtcgacctgaatgatgatcatttcataatacactgtgttgagtaactctaaggtcctcgctttgtttcagcaccaggattcactatgatgtctctgatcagagccgctacaaagtgaccgtctgcacggatggaaccctacaagatcgaaagccgtctcagccgtcgagtttgtcgagcagaagacgaggtggcaacttaccgtatcgaaacctggcgtagtcaaccgcttcgttggcttttcgtacacatgatcgttgtgcaatgtatagtgatggtgacccagtagggtcgcaaacacataccagtcggctgatcaaaggtttgtgatcaacctgtgctcttctgcggtctggccagagggactggctcgaacttacgggcaaagccaccgtcgtcgaagatctcgatgaccgacgacgaggttgtcgaaggcatccacatggcctgtactagcttttcgtcgtgaactgaaaggatgatctgtaaccggtagccaatgctcagctcgtctcgtcagtcttgaagaagacgacctgctcacgctagcccgtgaaagtagctctaggcgactcttgggatccatctgcttgatctgcgtgacgtgtacctcggcaatgtctgtcagagtatgcagcgcttcgatgagtttctcgtggtcttcatccaaaagttttcggtgttcgccctgggaacagccatgtcagatcatgccgcttctgcagtcttcggggcccgactctcacctggttgtcaaagtagacgacgactggcttgtcgaccggtgcgatgtatgcttgcagaccggcgatgacgctctctcgaacaggatccatgaagtcgagccgtacggggatcggagcgatgaccgcgttcatctgatttcagagcgtcagtcgtgtcagcacggcctgataagggttctaaaggatagggaggcttacctttccccattgatccgccagtccatgagcagcgtgggcagcctctgtggagatgcaggacgattgtgttttagcatcacactacatctggctcggctgcgtgacgcgtaaaacgtacttcgatcgacaatgacggcacggtccagcatgacggtttgtccggcgagcgaccggagccgcaaggaattacgctcttcgaaagtggctccaggtgctacgctagccaagaaacgcacgtctgcggcgcataacggggagggtttagggctctgttcccggggtgagaacgaaagcggaataaatactgactcttgctatctccatcgttccaggtgacttcctcgccacatttggggaacatccatctcgtaggcaactctggcagatttcccgtccgcaacgaattcaattcctttgccatctcgaccgcagaggaagcagtgccgttgagatgaagggaatgagggggagctaatgacagcgccttccagccgccagtaaacagttccgtcaaaaagttgctacgagtaagcaagcgtgagttgaggatctggatagatcaactgcaatatcgagtgcagacctacttgtgatagactataggtgagttggggctttatgtgagctggtctttcgtcattttccgtgcatggggtcgactcactcatgtagccatctgcataacgagtcgatcgaaagcataagcggtcagacagaaagacggccaaacgatacattccactcacctggtcccggtggatcgttgaaaatgaactgaaatttatcggtcagcatgcaaagtaccgtcattctagtctggtaaagagacgacttaccgtagttcctggtagccggcccactatcgtgcccaactcatcctcggcctcggtcacggcgatcctcctgaaagatatatcgccaggccctacgacctctttgtgatctggaatgttctcggtatcgtctgacaaggccgcatatgacccttcggtaatgtacaggttgtcgaacacgttgtagccccagagtcctgcgaggcttgttcagtcagagctcgaacgagctgtatctgtgcacgatgcttgtcccggcgtacctgccactcgttttgtggtcggaatcatttgcgataggtctatggtggatccgactgaaggtccgaccgggatctcggctcgcccacgaaagtaactagccttatcgctacgcaacgaattgctcgatttcgagctgtagatgtacgcgagcagcaggacaaagcccaataacccgatcatcgagctgctcgatttcagcctgaacatggtagatccagctataccgaggttggacggtgcaagagtgttgggtgtatgacgggtcgctttctctattcacaaatatgactacgtcgtgatgaaccctgtcgacccggcgagaatgtcgaccaaccattgcgggtgacacggggtgagtcgcttggttacggtcaagaaatctgcttccgatgatcggatgtgaacgcggacaaggtgaaatcttaaccatgtccatgtcgacggtcgagtacgaacagccagtcgttggacattgttaggactgtatgggtcgatgcgagatgatgtatgttgctcggaagacatggcaagcaagatacccaaattcggtcactatattctaatatgataagatgatggtacagcaatcctgtcgattgttcacctctccggatcgtctcaagtcctatgccagcgaaagaaatacatgtgacgtcgttcatgctccaatgggcagagcctcagcctctgctagcttgtcggccgcgttttccagagggagcggcttggactcgccaggcacgggcttatcccgggaaggcatgataaagtccatcttgccagtatcccggtctgggctcatcagacgagcgtactctaagtacattcggaacatgtacgcctgcatgtcctcgcgtcgccatgctggaaaggcgaaaaaagttggttgtcagatcgtccgcgaggagcttgtctctatccgaacgcgactcacttcgttccacccaacattgaccattgctagcgatccgtcgggcgacctcatcgtgacctcccttacccttgggcgatcctcggaagctgccaagcaagacgagagcacggttcagcgtcgacgtctgtcagttccattcttcagccgacagctcacaaggcaaggatggaccacaagtcggaatagtccatcttggcaggaacgtaagcgtaccactcgggcaattgatgggtatctacgtttaaaggtcattagcgctgaagcgttggaagcgaggactgcctttctcgactcactccattcggggaagatggtcgccttgatgacaacgctgtgagggacgattgtgagccgggatcgacccgtaacaagaggagcagggccgaactcactttcgagcggccatcaatcgagggaatcgcgaactccacgagttgccgtcggtctacaatcgggtcgacgcaacacaagttcagcgttattccagcgagcaccgcccgaaggctcgacgacccgactactcacgtcaaagacaaacttgaacgcgttggatcgctcggggtgatcttggggggcaaagttgaagttttccctggtggaagattgaacggataagtctcgtccacccagtacgcgtcggcgacctgcgggaataacccacttcatctcgtcgcatgtgccatcgccccaatcacactgccaaggtccaccgctcatggccacgtccatgtaatactcgctcaacacgctcccgctgatgttttggatctcggcttgacccgatgtgccgatgggcatcaagacggatttgcgctcgaaagagacgtcgttggcaaacttgtgcaggcgctcgcggtgcgagtcgagccatttcgagccgccctttttgttgtgcatgatcccggtcgccagacctcgctatacatcgagttcgtacgatgagaaacgggatcagtctttgaaatcgctcgcaaagtcgactccgcttccaccctcgagtcatccgactcacccagtaaagcttgccactcttggccttccacgcgggatcgtcaccgacatcatcccgtcgaccatccttgccgaccggggtgatggggatatcggcatgaagcgccgtccgtgaggggacaaagatgggcaagatcttggtatgaggcttgggctgcgattcagggcccttgacttcgagcgtgatcccgtgattcttgaggatctacaaggcagggcatatctccaggtcagtgccgcgggggcaaggaaagggtgactctgatggacttaccgaggggtgctggcaaaagtccatggcgctcgcgtgggaagccacaaacgtgtccgtggcgtctgtgcgatccggatgtgtagaaagcccgtcgtcagtatgcgcaagtttgcaggtccacagtctctgacaacgccgactgaccttcctcgacgtgtcccttgacggccggactatccttggcacaagcggccaaccatttcatctcgggcttgtcctgctcgttgactttgctggtaactgtgggcgcaacgtgctcgtcgtcagtgccgtgttgtgtgcgtaagatcgcggacatcgacgacggtggcgacactcaccctgcttcttcttggccaaggtagtcaactctttcatccgatcgtgaccgggcaagatgctcggctggtcatgaatcgtaaacgtggccctgtaggccgacgacgacaacaacaaaaacaacagcaagaccaaatcgaggctggtatcagcccacactcgacccagacgccctgcttcgagcggccgacacgacttgacctgacccgacccacctgaaatcatgcaacatgcccaagaacggctccatcaagttgatctgcgcatccgccctcggtctcgaggaccaccacttgtccctcgaataatcgtcgttccattggagctcgaccttgccgttctcgacgatgagggtgaacgtctcgacgaccttttcggcctcggcgtttcgtttggcgagttcggcaggggtgaacgcgtagaacgggagcagggcgttgaggatgctgttgagcgcgaagcgatgcgattttggtgaggtcagtatcgataggcatgccatcgaggaggaagggtttcgaggctcgcgccgagacctacgcgtcgtattcgtcgggcaagaggaccgatcgatcgctagtgaactgccacctattccccaacgcaaacgcacgcatacgccaagagacgttttcagcgactgtgctacgttcaaggagatatcatccgggagtgaccccatctggccggggacgtaccactgatcgaaccccaagggcgggttcctattccacctcgtcttgtactcttgaaccgcttcttccagcgtcttgctctgcctggctaccatgtcctgccatttcctctccccgtccctcaagagtcccaagatggggttcgtcaacgtctcttctaccacctccgaggcgttggcattggcgagtgcgagactatcgccatcggattgcaacgtcggaggccgaaagacggatctctttgcgcggacgatgccatccgagacctgttccaaggtgacctgttccgcccgttccttttcgtgcctactcagcgcgtcaaacgggctgataaagaggcacctccccagctcgtcgaattcctctggcatgtcacccccaccgagggagaatccgaaattgttgctgatggaatcggggaaccagttgaccgggtggatgggcgaggtcgggggtggggtgagatgtgtagggatctggggttgggggaggtcggtcagttgtaggtcggccggtgcgcgaccggtacggacacgttgcgcacacgttcgagcttatgctcatcgcatgcatcgtcggtgtattcacgggatcgagtgtgtgaacgagatgaaacgtcggaccgaggtgtttggattgataatcctgacccatgacccctgactgtttgattaatttcaaatctcaaatgatgtaattcgtgatttttcaatcaaacactctctgtcccctttgctgccccgctgccccgacctggttagcgcgctcagctcactcctcccccgatcctccgtatgtgtgtctctgtgcgatctctgaatctggttcgccgtaatcacaagaattagacatcgaaacacaatcgacatacacatctacatcgaacaaccacccactcaacacctaatctccaacgtagacacactcgcgaccaacgtcataaccaattccccctaggccggcgcctgagcacccattcagcgacccgaacaagaggttgaaaaagaggagacggttcacatcccatctcccccttttcctcacccctttcgcgcgcgaccgggtggtctaccaccaccccctattcccctctggcctctggatcactacactcactcgggcagactagcaacactccctgcgatccgtctcgtcctcctcgaatcataccggtacacctgaaagcgaaagacgcacaatctatctcttctcggaggcccatcatgcacctcccttcccatatcgccaacctgaacgtcctggccggcacgcccgccccgtctcctttccgcaccttgtacccctcggctcatccgaccaccctggtctcgaacgacgatgatactaacgtgcaccataccggagctggagctggagtcggagccggggtgggatcggggatggaagacccattgttggaggaatccctgaagcgacatctggatctctggataaataccgagttttcttggacagaggatggacaggccggtgcgtttggagaggattccccgagggacaaggaggtcgagggcggggtcgattcccagacgacaacgacgacgacgacacactccgctgtggtcgaaaaggacgaggatggagagatggagatggatttgatggactactacaagacccgggtgaaacagggcaaggaaaagaacgtcctcctcgatcagcggttgggacaggacgatgatctccatacggtaaaggaggtccggggtcaggtcgacggtgaaacggtccggaccgccgtcgtcaagggcaagaacgagagcctagccgcccccgcccccgccgctccagggtcgacgactcaagccccggatctcgcatcgtttctaaaccaatactcggccctcctttcatccactctcccctcgttcgactccttggaccccgtgtcaggacgatcggctcgccccacccagaccggtcaaaaggcggacgagggcaaagtggtcgtccaggtcgaccaagacaaagaagagggcaagagagaaaagatcgatcgtaccaccctcgatacgtcttcctcccagtcccactccgagaccctcgaatcgaacaagaccacccacgtaccctcttccggacctcgaacccgactcccgccacccactccgcgcgcccagcaacacctgtacccctcggcgcccgctcccactcccgctcctaccaccgacgtccagaccgacaacgacgacaagttaccgggtcaagaacaaaacctgatggctctcctcgccgcggcgttcccccagtacgcgagcacttttgaagcgcccgccccgcagcagcagcagcgacactcgaacgcggggatgaacaatagtagtgatacctacctcttgtccggtcacgccagcgccaacgcccattcggccagggcaccacaagactcgacgaccgggaccaccgctaacccggcgaccaaccactcgaccccgttcgtctatgcgcctcatcatcccgctttcaaccagcaccaacacggcgggatggactatactgccgctcatcagcagcatcaacagttgtctggcgagatcgatcgggtgtttgggaccgtcgatctgggtgaagggttgtaccaccagcaccaccagcatcacgatggcgccgctcaaaagacgattgatatcctccctcgtcgaacggggagcgcttccgccgggtcgttgacggatgccagcctgaacagctttgacctcggaacttctgcccagcaaaatctcgtgcaacaacaactcgccgtcatgtcctcgtcctcgtcctcgtcaccctcgtccccccctcaggggaaaaagagacgagtatccgacgactcgagcgtcccgagcaacgtcgtccgcgcattcgaacctaggtttacccaggcgtcgttggccagcttgaccgtacaggccttgggtcaagctcatgggtacccccaagagtcgacccacggtctcactcagtcgcaaggacagtccaggaagaggtcgttggacagcatggaccctgatcagcacgacggtggggtcttgcccgacggcgtcacccccgaggaagagtgagttttccccgcggcgcaggggcacgtgtttcacccctggcccattggtcctttgcaccgcgcgaccttgacgctaatcccgccttgctcgtgttcgtcccgtctcgctagcaaacgtcgacgaaacacggccgcttccgctcgattcaggatgaagaaaaaggaacgagaacaggcgctcgagagacacgccaaggagctcgaggatcgattgaacaggatggaacgagacatggatgggttgagaaagggtgagtctcggtcgaacggaaatggcttgatgtcgacgccgagtctttcggggggacccagggctgattcgattctgcactacgacgtgttctctacgacgacacagagaatggctggttaaaggccctcttgatcaacggcgcgcctcaaccgttttcatccccctcggcctcgtcggaagagggcaagatggagaccacctcgggccacgcccagtcggtcgaatgagcgcggatgacgcgctcacgatcagctcgatccgttcgggcgagacggaccacgccgtcgacaactcgccataaagaatatgtttgtctagagtcgaaagtggttatgcaccaactgcatacccggttgtaaagagtaacacggaggggggaaaggggctgacgggctgaaaggaaggacgtgtgtcggatatcacagcaagaagaagaaggaagaagaaaataggttgttcaacagctgcctcagctgcgtcgcttggcttttgtatataggtctcgtctggtgtattccctcctcttacggcattcccgtcgtagtcggtcgtcccgcctcggtcctctcccatgtcaacacatggccgggagagcggcgagacggtctcgttcgctccggaatgtcaaaaggggtgtgtaagcgaagggggaacttgttcgcttcgaatccgtatacctatggattgatcccgccgtgtttcgcttgcggactggcaaggttgcgcagagactatgggaatctgggggtcgagagtgttgcgccgcgatggcgagttgagaggttcgagccatcaatggtattgttgtcaggaggcgtccaagtcttccaacaacgatctcacgctttgactttacttatagcggacctcttcttgtctatcaaaagttggactccatgacgacgagatgtctcactctgaaacgcggacccaatcccttctcgcaacatctgatttctcatttcctagttggtcacggagataactcatcctcgaggtgggttgagtccgcgggcgattacgcagtgggagatccggccgggctgtaggtcaatcagtcgtgagtttcggattgcggatagatgaatttggggtcgggtgatcaagtaggcaataaataccaattgacgaggggcaaagaaacatcaagtagaacactatactctgtcatcactatctacccgtctacatcaaacgcgttattcgtctacattcgttgcaacatggtaaatgccaacgagcaatatgccagcgacatggggattgccaatatcactggtaattatggtaataatacattccacacccaccaggaaatggcacggaccttgcagtggatgtcatcaaatagaaaagaccgttatcttcatgaagggttctggtcggactcccaaactttcatgacaaggttgcttcctctacttgttctctggccggttgtccaccagaatatgcagagcactgctgcaaatgactctcacttgatcactgtcgctagcaggtgctctcattgcaaccttgctttatactgctgagggatttcaactcgacccatttgtaactccaaatgtcgtcaactgccctctgcatactcttctcgagtcgatgactgaagccattggggaattccaggcgagtgcgagcacctctatcgagatctacaagtgctccgaggtccgccatcttgtgcttccggcgagttcagcatagtgatcggcctggatcttggcgctcaagctgatgtcctgggttggcgctcatcagaagttcccgggagaattcctgtccaagctagtgggaatgcttgacgatatccaggtagctctgaacccaaatttcaatatcatctgaccgcttcgcttgcacccaataggccgataggtggcatatcctactcatttgcgatatatcaggcggatccgcctgcaatcacctagcctgctctaaacgcctgaaacgtcaccgtattgtcaagggtgacttacgccacgagcacaataagcccacactcacagcatcaaaatacgtctaccctcggctccgtgttcgttcattcctgagcttccctcgaggtgactgacggggacatccaccgacggcttgccgccagctataatgacccccaaaggtttgcacaagccgtctgcgacaccgcaaaggagattaagtcagaatctggccgacgaaaggttaaatcccgaggccgcgcatcccatgctctcaataagcacaccggcattgacaatgaaggcgcaggagctgagacctccatcttgtcgctcaaatatcggtaggcctagtaagccaaaaatatctacagatcgccgagcagaggttctcctgtagtgacctggaaattggccgcaccgggcgagagcgatgctcgaagccagctggcatagttgccggctggcatttgagcccctctaaattggtccgtaagttggtcttacacctgacgatatgtttcagattagtatgagcttccccaaaactctgttcaatgcggcatggatttactcttctggcctgcacacagaaccaagctcctcttgatctgtccgcattgcagcatctcctcctgaaagcgatcatggaacaagaggtaatccgccggcaggtcatagcggagtttctttttgtcctatgcatcgggattcgagggagaaacgatccacaagatttgaccctgcaatacggtttgaacgcgcttgcgatgaacagccttgtaggcggggaagtggtggcgacgcactcgcgccattcgtttcaacacccggccgggcaggtagctcagtctgtgacatcgttctttgcgactcggttgggtgcagttgctgcattgagtgtttcccgcagacctgtgtgcggcgttcggactcggcctgtaatacatggtgatctctctcacggtcaatcttcatgtcccctagtcggtaacaaaagtcctccatctcgtcgtctgtgtgcaatggcacggaatgatgagtaaagcccacacagccgagaattaatacgaaattggttgtcatctgatatccttatcatgaaaggacgttcaagtagctacctatcctcaactgaagcttgtctcgctcgttacagtcgcgagtcggacctcttgacaccagactcgaaccccggtgttcttggttggaaccttgcccggctgtctttcccaggtccagatatcaacctactgacggtcatgccaaacagatcaacatcgtgaaaataggaaatatcgcaggaccggtggaacggttgtaaaggttggttatgaggaggacgagaagaaagtcgagtgagcggatatcctccagggtcgactggaatggcatggcctgcgtgagatggaatgatggttcaccggaagcaaatttacttccgaacccatatctcccttccccccctccccactacccccgtggctcctgcgagcttaggtcgaccccaggtcggtcgggtcgggaatccaaacgctacatctcggggttacacacaatcgtcattaacaccctacgatcgatctcatcacctgaacaggcaaggtccatctaggatacgtccacaggtccacctcgttcactcctgcagcacccgtcgatcgaccgatcaatatcgcgcgacctcaacccactcaaactctcacacacagcaaacgactagctcgtgagtcaaaggtagcttcggtcaaaccacgaccatgtcccctcattgcatgctcacaactttcaaatctcgtcatcaacggctcggttctctcgaaaccttcttcgcactacatcctccagtcacactcgtttacagacgttcatccgctgcaccgcaatcaccagcataccgcatcaacagtgaatcatgccggtccgaggtctagaacgtgagtcctgtcggaccctgtcgggctggtcccaacacacccgcccgacctcgaagcggtcgtcaattctgcacggctgacatgatctacgatacaccttcccatcgtcccgtagccttgctcaacgagcgtagactgatccagcaagcaccattgtctgctctggccgacacgaggatcgggatcgacgtctcccaatatctccgtcaaatcttgacttctgaatccacccgagaaccactgatcgctgcgaccggtggactccccatcgccctgaccgctcacatcgaagccgaccttcgaaccctggaaaagtaccgaatcaaacccgtctttgtcttcaacgggctgcctttgtaccggaggaacccgcctagacaagcccaagagatcatcagcggacgggaagcggcgcagaggaatcacgcgtggggtttgtatgagcagggacatgcagaggaggccgccaaggtcttgaccgaggggcagaggcatgggaactgggtcgtcccgatcgaggtcaccaggttgatcttgaggatgtttaggcataggatggtcgagtatattgttgcgccgtacatgcaatggggacaggtgagtcgcgaagagtcgagcaggaccaggagcacatgcgctgactcgagccggtggacattgtcgctcggatgctcgacagctctcgtacctcttgaaccaccccaagggttacgtacattcggtgttttcctccttggagatgctggcctttcccacccaacgggtcatcacctcgatcgactttgcgacggccacctttcgtttcgtcgaccggggtcgagctctcgccgatattgggctcttgccggaacagttcatcgatttcatcatcttgtgcgggacggaactcttgccgaccttccccccgttggcggacaacttcttcaaccggaccatcattgacatgctgagacatttcaaatcaggagcaggggtcatcgccggacactcggaacaccctgcagttcgggcttcgggctacctcgagggattcttgcgtaccagggctgcaatcaaatactctctggtccttaccgccgaagagggtacctgcctgcccctcccgctcgttatcccacccacgcaacagacccatgccatcaccgcctccgaggttcccgccgacattcacgaaatcttttccggacgactccccgacgagctatactttcacatctcaaaaggcctcatcagccctcaattggtcggttggctcacgagcggaatcatccacgagcttcctccgctcgataacggggagagtatcgaatacaggaaatacattgaaaacgtcattaccgagggcgcgaccgcaccgaggtgtacggccttgtccttgttgacatcgtgtctgaatcaagcttggcaacaaaagaggattgtgggtgcctcatcacatgcaacgcgagaggcagatccaagctgattgttcgcttcggctttttctcttgcagggagctcactactttttcgacccccctcacatcaacatgcaaggccacgtcgtcaactttaacgcggccgagactaaaagtttgactgaccgatgtgcgagttggcacgtaccgtatggtacagtggaagatgaactgagacggcagaacgtcagtgccgacgacctggaatgacgaatggcaaggccgtgtggactgacgagacctctcgcatagtcgtcgacgatcgatttcaagctgtgtctaggtgcgacgagttcagaagagtcggccaagaggaccaaggcgacgtccaaggcgggcaagccgttggaaaggagggatgagattgtggccaatgtgatttggagattcttggacctaagagggtaagaccgcctgtcatcgcaccgctatgctggtctgcaaggctgacgatcgacggcaccggacgtcgcagcttgcaaaatccaaaccacacgcataccacgctcggaaaggcgctttccgccgggatcaacgcttcgagggtaaacgacaagttccaggaacccttgtacctcgcgctcgagttggccagggccggtgtattgcacggcgatctatggagcggacgtacatacagcggtggacccagtttcgggactcgtaagtccagccgctctgtcaaattacgacttacgagcgagtcctaacggtgtcatccgtgccctcttatagcttccgagatgacaagctcgctcttgtttatgaggtgtttaagtatcgtgcccttgtcgtatcgagtgagcgtgcggaaccgagctcgacgacgactcgcagccactgactggacctccgacatgtgccactctagtcgcaacagtggtcgggacccctgagtcgagaattgctcgtcttcaactcctttgtaaagtctctgacgcgctcactcaggcacctgatggaggcgacttgcgtccacatgtttttgaagggcgacgcaaagagacagagggacgactttgtggatgttgcattgagtgagcgggccaagtcgagatgttcctaggaatcggatcgctaataccatgaatcttacgcctgcaggccttcccttccagggcgaggtcaacactggattcggagtcttggccaaagtgtacgtcgacgcgaccatcgctttctatcagggcatgccggaaggagatccagaggctgcagaagtcaaagctgcgaaagagcaagcctttgaagttgtcgaagagacctttgttatcgtcaagactccgaaagcggaaatcgagagaggtttcaggttctgggatgcggtgagcgccccaattcgcttcgcttcgtctccactcacgctgacgtttcgacggttcctcagttgatggtttcgattcgcgctattgccaaggtgcagggaccagatccccagattctcaatacaatcgtcagctcgtcggttatcgagcagtttgagaccgcggaccagtggctcaaaccgttccgcccatgatcgtggacgtcgcatagacaaggttgaaggaaagcatacggtctcgggatggcgcacgacgggtttttgggtttttgtaggatcttaatcatgaccaatgcattgcattaccggaacacctgtctcgatccttctggaccagcaggtagggctcgaggacgataaccgggaatatgttggatacggaaccgatttggcaggcaaagcttgtcaatgcgtgttatattaacgtttttctctgaaaaaaattatcacgtctcgttggtctagtggttatgacatatccttcacataagcgcatgggaatcggatggggtcgggggttcgatcccccctcgaggctctcctttttgctgcctttttggcggaccgatggacctgtcgaagctgggcgcaacgtatcttcaacaacgcttatctgtatggccacacgaagtctagacgatttcagcccgtcaattcttatatcgcagaaaactgaatcaggtcgactcacaggcccatatgaagttgttcacaaaggctcgatcatggatcgcggatcctcgcaactctcgacatggatttcccggaagtaaattcccatccgtacctgcattcaaaggtcgatcacttcgtcaacacgcttcttactcatcttagaccttgacaatttgtagctatatctcctgcaactcgtctacccggcaagctaccgtctctgataggtaccttgcgactcgatgatccctctgatcggttcgcgggattatctcgctcgactcatccagcatcttcagtcgcatcttcccagcgactttctcctcgacaagaacatctttctcgggatcctcttatgcctcatcgctggacagcggaacttgattgtcgatgtggatgtggatgttgaagacgaacgatccgatgaatcgggcaagagtcgggaggaaggtggcgatggcttgaacaggaaagagcgagagaggcggttacaggataggctcgagcgagtgtcgtcaatgtgcaaaatggtgagcgtctgcatcattagtcatttgcatgggagtgaagctaaaggagacggccaagcattctcgccttgacagatatgcacagcgattttcgacgtgacttgcaagacgagcagaatatcttctcgctggactgccggcgatttaccctgtgccgtgttccctcctctgcccttgccagattcaccgacgttactttcagggagctcaggaggggcaattccgggcaaagggcaagaggaggatgcacgcacgtcacacgttcgacctccacgtttcaaaccaagcaagcatcaccacaaggatgacacgatccaggccaatccgacgaaaccagttctgcccccgcctagcaaagcccagacgaccatgtcttctgagaggcaccacacaccagcacagatcgtcgacgtcgatgtggatgatggaaccgtctcttccaacacgtccaaagcttctactcgatccaacccatctatatatggcaacgacgaggccgagcttgatataccccaagtgctcatcgttcgcggactggaagacgctcgacatggggtctatctaaagttcctggagatgctcgaagagcgacaggtcaaatgggtggaggattttaccatcaaccaggcaacacccagcggaggtgacccggtcgaccccatggtgcggcccgaggaagggaagagggatcgatcccaacctctccccgaaggcttcttcgtgatctacgttcggccttgccttgcaccccgacttgtgagacagcaggcgcggtccctcagaacctctcagcgtcgatcaggtcacaaagggacgaaaaggcagaccgaggcttctgtagctagcgagggtggggggatccgggtaccgggttggttcatcgacaagtttgcgctgagctgtttggcagccgaggagacggtgcttcgagccgccgagattaactcggactcttggcacaatcactcgcgtcaggacaaggctctcatcgatggcaaggtgagaccacgacaagggcgtgtagactctcgagatgcatccgtccttacctactcttgcccttgcagctgcttcgcactctccgtcgactctccgaaaagacgcatatgcatccacctctacgtttcaggatatccgacctgatcagcacaataattcaccatccgagcctgtatagcgtgtttggcagtaccagcatcagcgattttaagacgttcgttcgaatctcaaggatcctgttccgacctttcacctggcgaccggacctactgaaccttgatatcaaagggagagagtatgatcagcggaaaaagctgcaagaggcgatggagagggaggaatggtacgccatcgaggaggacgtgcgacggctttggagaaacctgatcagacaccgagtcgaactacgaccaccgcgggagcgaatcctgtacaccaccatcgggtccgcttcgtctcaccgaccggagaagaacaagttgtcctactcgagtctcgttcgacacgacgagcgggtcgacgaaatcttggacgagatcttggtcgttctcggttgagtcgcagcgttgccggacaaggagagtatgagattctattctattgtatcgtacgaatctattggttcacaactttgtatcaacgcgctttcttttattggattttgttgtatttctgtatcaattgaggtcgagcttgtgatagtcgatccgcctgtctagatcttcgagttggcctcggatgtcaatttcgcctgtcggatcagtccggcaggagcgtcacctctaaggggaaaaaggggtccgtcagcctgttcttgtgtcactcgttccgctgattctcggtagcaaactcaccgaggcatgtagacctcgatcaatctcagcttgttgggcacgttaaagtccttatccttcaagagctcgtcgagttcggtcggcgtatggacctcgtaggattggtaagggtgggtctgtcatccacaaaggaatgagcataagaggcgacccaggatcgtaagacgctaactcacgctctttccagcaaagaacgggagcatcttctgccaatcgtacatctgaatgtcattgtattcggcattttcaccgtgaatctgcctctcgatctcgtacctatacggacaaatatatggggtcagttgtggaaactagtcgcgtacccctcagacatgacttgcccgtcattgttgaggacaaagaggtaagggcaagtcttgcggcggatcatggtcgcgacctcttgcagggtcagctggatggagccatctccggtgaacaagatggtcctcctctcctccttggcctctttggccgcaagctgatccgagcgggagcgtcatgagcgaggatgcgcaaggttatacgtcttgtgcgggacctaccacagcccccatagtagcacccgtagcccatccgatactgccccatagcgtctgggtcaggcacgaagcgttcttggggaacgggacgttgacgatgccaaagttggacgttcccgtctcggcgacgacaatatctgtgacgtgcagtcgaacacgtcagccgccttctccaaatatatcgatcggttcctctcagtatacagcgactaaccgttgggctgcaagaatgctccgatcctgggccagaaccaatcgtgcttgatggccttgccatcaggttcagggactttgcccagttcttccctctgctttgaactcttgtcgatgagtccgtcgtccttgtccttcggcccgccgttcttcttgacgattgcgccaagggctcgggtcagatggggcaagatggtgcgaatatcgcattcagggtaagaggcatagccaatcttggtctcgaacgaatggagttcgaccgtgtcctgtgaatgcccaagcgatcagtatgagtcactttagtagcgaagccggatcactcaccttgacgggcaattggaatgtaaagcttccagagctgtgattccgcacaagaacagatcagggtgtgtaattcactcgcattgcgcaggcacacgacctacttgaagtcgctctccaacttgccagccatcatgacgaaatcagccttttcaacctcttccctgaccgcggggagcgagttggctccggcatatgtaccgccgaacaaggcgtggtcctcgtcgaggacggatctgtcgacacgacgggctcaacaatcagcctcggctggaatcgcaatcaatcatagcatacgaggcggggctcactttcccatgggtgctaacggggttacgaagcaaaaaaaaaaacgatcaccgtgtaagtcccttttcactttctcgccgcgtggtagatgccgaccgaccactcactggcaaagaacctgactccggtggcttctaccagctttttcaactcgggtccacacccgaacctgtcggcgcaaatgtcgacgacgacgaccgggttcttgctcttctcaaacctctccgagatctcggcgatacagtgcttcaagacgtccgactgggcgtccttgatttcctgttcctgctcctcgaggacgggcgccgagtgcggacggggtagcttcttttccctgagcggttcgtccgagactttggcgtgcaccaggtcggtagggagggtcaggtagacaggtcgacattccgtcaatgcgacggtaagcacgcgatcgatctccgacgtccagtccgagttctttttcagtatcccgacggcgctgctgatatgggaggacatttcggcgaacgagttgaagttgccttgtccgccgagggtatggtggagcaaagccttggacgtttggagagaggtcgatgggacgccctgatcaagtgggatcctgcgtcagaccccatgataggcttgctagtcgagaatgatacactcacgactaaatgaaggacggggacgcgctcagacatggccccggcgatcccgttgagtgccgagagttcaccgacaccgaacgtggctgttgcgccgaaacaagaacgacatccagatgatcagcctatgtcctcttgtacactgcagagtaaaagctcgctgcaactcactgacgaccacaccgaggctgtgcttgacgcgagcgtatcctgcaggacgtaaaccaacttcagtcgaatcaaagactcgcaatcgaacctagacccgagcgggtgctcaccatccgcgctgtaactggcgttcaattcgttggtcgagccgacccattgaatatccttgtcgttctcgacaaagtctagccagtcgaggttgtaatcacctgtgtgctccgatgacgaaagcgagcgatcgtggacgaggcgttgtggagtgacggtagatgcggtcgaatcgggacgacgggcggtcgcggaaagaagacgtggaaatggtcatagcagggtgagtaccttggaacttgtccaagccatactcgatcgagtagtatgatggacgcggtggtcttacctggcagaccaaagacttgtttgacgtcgagctgcttgagcctctcgacgatgtattgacctagttcgatctcgcccatgttgatcggtttgtttcgaaaggtgactggtttctggtttgtggagtgaggagatttgaaagctgatatgacttggatgatttgctgatttgctgattatgaacttgcgaacttgctggacgacgtagatgacggctggtgatctggtgatataactatttcgactgtgacattaacggcaatctatttccgagcagatcgacatccggcgtcacggggcaatggtgagggtgacgtcagcaggtactcaatgccggcatattactaagctaacagtcaatctcttacgtccacactctcgtcatcctatttctcggcatcacgtcgctcgctcactttgtaaatagagagcgaaccgaggtatcagggatcagtgacctcgtcttttgccatcagaaggttacatcaaagtgcctggcaaagtacatcgaccataccttcctaccgtcgacaagctctccacgaccacattatgagcggacctacatctctacccgaacttctcgaacgctcttcgaccctgcagaccccatcacaagctcgacttcaagcgctctacaccttcacctcgaaccaagaactcaccaacccggcagggtacgaagccaaccttcgatggtggtcctcgatcctcgaagaatcactccgagaaggactgatcggaaggagttccgactcggtaggagatagactcgggttcgaggtcgacaaggaaatcgtaggcaaggctttcgaatggaccgcgggagggttgacagggacgggaagacctaaagggttggccaacgtcgtggtgagtccgagaccccgcggagggggactcgccaaacgcttcgactgatctcgattcccgatgtgtgtcgatctttcgactcgcatgctgcaggactcgcaactctcctccacccctccaacatgttaccctcggtctgatgaaagcgtcacccccccccccctttccctgggatcagcttccgtttctaacggatgacggcagagatccaggtaggcaggtggagggcagacgacaccgcgacacccggtcaatcaatgaatctcgtatgcttcgggctgtgcacgaccgagtgtccccatgcgcgcgtccccgggtaattctcgatggaccctcgataccgagctcgaatcgctcgagatcggccagctcgcactttgtttctgcacgacaggcgggggacggtgggcatacgggcaggtggtatagtcgtacgatacgtgcgactcctacctgtgagctgtaggtgggtaccaaacccctgccgtgcgattggcagagctggatcgctctacgcccccatgcgggctgctgcctcttgcctgtgggtcaattccgggagcagaaatgtataccccgaagtctcgcgctatccctgtgcaagttggtaaaataattactgcgaatccgggcttgagatcgtttcgccacccatcccatgactttcttcagacgggtcgaccgggagtattttgacaacgagtttagattcgcaatttcgcaactcgccctgtgatcttgtgaactgttgatgctcactcagctcttctgccatccaagagatcgcgagactcgggcttcaggcagatccaccacgatctcaccagtaccgtctctcagagtttatttaaggttcacgttctcacaaaaaacgatccatcagtctcagttcaagccacatcccagggacaaggcacagcgcagaacagagatagatacggagaggaggatcgatcgatggtctctggctttcatcggacgaagcatctcgagcttgcaagacgatgtaccgcataaatgagcagcagataacagacgatggccgagcgcggggaggagagggcgggattatcagcgtagttaggttgtcagcgatatcatctccctccctgtcgtcaactttcgtagtcgtcagcggtggacctcgagagggtggctcgatcgacacgtagaacgtcgcgcttgatggcagcctccgttcgcgcaggagatacaaaggcgacgagttcgtctcgaacgtcaaaattggcgcgttgttgtgatcgtgcacaggtagggctatcgcatacagagtcgcataccactcatcgacctgggaccgtcatacgtcgtacaaaccgctgccataggcaaacaggcaggcagggaaagatgcaccagacgctctcgccgactacttcttcctcctcctcgcctcgttcgggttcttcttcccgtacccgaccgtaggcagaccctcgccgcctgttcgacgaccttttcctgacgagcccgtcgtcaggatttcgggcagccactgcgatgcgacgggggcaacaacggataggattgtcgatcagcaacgacaccggggctgtatcagggggaaacatttcttcactcacgtccgggtcattccaactccctaatcctgctcctttgccctccatctgcgccttgacggcccgttccagttctttatcctccttccatctcctcccttcttcccgcttcagtccacgctggaactctttctgatcttcccgcaagatcaacccgcccccgccgttcgaggccgatttcgaggaacccatcttgggcgctgggatcgaatagacggtcccccgcgttcggtactggaagttttgtttcaaatggacttcgatccgaggggtcgggttggctggggtaggtgcatgcgtggtgatgctcgctcggatcagggtgggaccaccacagttcgggcaaaactttttcgaggggtctttacagatcctaagcacgtcaaacatgtcgagtcagagtcgagcaagcggaggacatcgtcagtgacctagtaaactcacttgaaacaagcgtgacatctcaaaacccagctcttgacactgttgatccgcttgccaccttcgccgaccaacccgagccccatctgaacgagcacgttctgaacggcataatcaccggtgaaacacgccacgccaacttgagtcttgggcttcctcggtgctcgcttctttttcttcttgatttcgggcaaggttcccgctgtcccttctgtaggcgtcgatcccgccgccgttggtttgcctgcttcagtccgggtactaggtaacaatcctagatccacggccttgtgcttcgtaacgttctcgggggtgatccattccccagcaccgctctcgtcccacccatcatcgctggcatcgtcatcctcttcgtcgtcggcgtatacctgctcgaattgctgttttcgagcttcttcctcttgcatctcgagacgcagctcttcgattcgcttctctcgttcggtcgttatagggggggagtccgacgtgataggtcgggtcgatggcgtaatgttcatctcggccagatgagcttcgactgccttgcgatccgcctcgtcatctcctgcctgacgttcggaaagggcggcgggtaaagaggggaaggcatccttctccccgccctcctcctcatcgacttgtgctgaggcctcgacctcgacgggcttcttgacggccccccatggactagccttgggagcagacgcaaagccggtcgggacggtttttgtagacgggccagcttgaacttccgtctcagtatgatcggccttttcttctttcgatggcggtgcggtttcaacgggttcactcaaagtcgacggcgaagacttcttctcggcatccatagcgtatgtcaacgcgaggacggccaaatccggtttcgaaagtacggcatagtctcccgtcttttgcgcaaatgcgatcactatattgtatcattaaaatgcaatcgttaattctgttcacatcggagccattacctagtcgagggggacgtacctttgctaagactgatggcatcgggcgacttgacctcgatctcgactcctccgatgagacccgcttgaatcctctcccaatactgtcgtgccttctcgtccttcaactccgcaatcacttgaggaggagcgacgaatcgcttggccatgccgcgaagaggggcgagggagaggataggaccggcatcgagcacgagcgtatggacgggcacgaaactaccgcttcgagcattggtggtcggcttggagctggaggtgtcgggcactggtatcgagctagactctgccatggttgggtttgggacgatagatactacgagctagactgcttacacggaacgaatctattgtggcatgattcaagttgtacggacctagttgacctgaaaggttgctcatcgcctttcgccgctttcgaacttttacgcggacattacaaccagatcatgtccgttgatccgttggcgctttctggcgtcgcgtatctatcaactcgcactcagtcatcatattgccctgcccaccttagtaggagggtggtctctccctagccagctgaatgtcgggcactgcgttacatgacagaccataagagcaagtcagaagtcaatgggagctgtcagactccctaggtcggcggagtctgctggggtttaatcggacgaatcaaagttggtgatcatcaaagccaatgacccgctccagaaatagttcacccctatatcgatatcatacctgccggtccttacgtttacatgacacacccggagatcttatttttcaggcgagccctctcttgagtgtcgtggttccagtgtttttccgctggagttgcgatatcatgttcttcacgttgtccaccgcgattccaacggacccatggtggatctgggtcggccttcgggcagaacaaccgagtcctttggtccatcgtctcgtctcatggaacggtccacaggataaaacgttcaaccggatttcacctcctccgtggcgacaggaacttgacacgataataattgtgtagcatgcgaagggatatctcctccgcataggtggcggtctgagataatggataggacaaggtacccccgtatgacaaactttcggtcgggtccgagtgtccctgaatccgtcacgcggtgcgaaccaggattccagtgatagctagtgattgagggattccagcagttcacatggattttaatctgttagtgatcgctcaccactgctggaatccgaagatcttgaatgatgagacttgctagaatgttgttcctgatgataccgttcggatgtctaaaagctcacaggacgttggagtgggaaaggtccgcgtaacctggacagcgaccaggagaggctagcctgatccggtagtcaggccggaccgtggtttccaggtcgtcacgttgtgacctagagtccacgtctggctagacggtccaggatacaggcactctcgtcaggagatagcagcctacgtcatgggccggagggaatccggcccgctaatcatgaacgccgcagcgagagagggagaaagaacattgcagataaacgacagagcctcgagtggggtccctgcaagatctgcatgacccagacggcgctggaaaccttccacgcggatatcccggtcaggggaaagctcggccacttgcgtcatgggtccgttggaatccgcagaaacaacgttcgggcagcaatccacatcagccacgtggcttagcagctccccgattcccactcacgagcgctccagatcgctagatcaccgagagttggctcgggcaaggacgtcgaaaggaagtggaggatgctccctgcgaatcggctcgtttggtaagatgttcgccagagaaagacgcccggcgcgagttagatatggcattcatacgggttgctaccgcgggtaatcttagttagcggcttggattccagcgattagctcggcaggaccctggtgatcgccccgtgccgtgcctcgttctctgcgccccacgcctgtcgggttagctgtttctcgccctattcccacggatggatccactttgaatggatgagtcccgttctgctttccaactctcgcgtcacacctttgactctccgctttacaaagccaactatataagatcctcacgtccacaccgccgaactgcaccgagcccaaacgcttcgcccgctcgcccacatccacctcgtctaacgttcccgccgaacatctcgaaaggaaagggccacacctcacgtactcttcggaaaccttcgcaacactgcccacgcccatcaacattcgaaggagcctacacgcgccttaaggcacctgagtattgatactagactacatcatcaaatacatgacaatgggtgcagtcgctacccttgacagtcctcccccaagccgtactcgcggtatcaacaggagtcttcgcagccagaatccggcagtgaaacccgagccgcccgtttaccacgacattgaggacgatgaagatgatggcgagagctcggacggtctcgaggatgacgatatgcgtagcggtcatgagaaaggaagtcaaaaggctggcggggtggactctgtcgttggaggaggccgtcgactcgatgctgcttcaggccccgtgaggcctagcaaggtgagttcgttcggcagttccctacgcgtacaaatgttcacgcctgattgaccaccactatcactggaccgtagtctcgcgtcaagggtgaatcttctcagaagaggaaagagcagagtatgttttgactattcgaccttgatcattgacccattgatagagaaaagaccagcctgctaacacgcttgcggatttcccttcgacctccacctcacagatcgaatcgctcaacgcgcattccgcaaacgtcaaaaggcctacttcatcgatttggagaaggaggtcattgaaaagtcgagcaagattcaggccataaccaagagtaaccaatcgttcatggagatgatggagaggttgcagagggaaaacatcgccgtaagtgtctcgatcgtcagcctttcgattcgccgaggcgtgcagatcgagaatcgaagtcccgcgcgcttacacgagaactttaattcattgcgtgatggactccagctcaaagcggctaaagcaccgaacctatcaggcgtctcacctttagaaccattcgataatctggcactgctacagagccctgacggcctggatctctcagggatggaacaccacgaagcaagacgtccgggcgagtcctgtacccctcagccgcctgtggaaccgggccgcatcaacaacgacgaagacgcccttgtctctgtcaacgaagtaggcccgattaacaacaagaagaagagaaagcaatccgcttcctcatctcgacgaacctctacaatttcgcctgcgcaatcgtcgtcccggtcttctccaggacattcgcgctcacccaaatcggcgacccctttggagggccaacagtctcaaatgggtttcacggctggaccatccagctactctcgaaggcagtccagccatacaagtcaggcgagcgtctcacagacatctgttctggcagcgcacgcctcgcctatgcacatgtcattctccggcgccctgccccaaacggggcctacaccaaatgctgagcatgtcaccgagataatcaacaatccgacttggggaacaagtaggtcatgacgctctagctcacccggacgatgcaagtcttactgatattaacaatgcctggttcaccctgctctcttatcagccgacacgcaccgttcgcaaggtcataacgtcgaccaggctacaactaccgaagccgttcacttcgctggcttccctactcaacatgctacagatagaatatacaaccacctgcgaccgcagccgcagccacagcagcagcagcagcagcagcagcaagactcgattcctccgttctcggctcgaagatattctgaagcgctacggaaataccatgccgaaactcctatcagtccgacggcgcaggcaaccaggccacttacggccgacagcatcggctcgatggcatttggcgctcccgatcgctctcaatcgctttcaagcgatcatacggcgcttggtttccccggcggaaacaccatgcctttcgccaacaacagcggatggatggatctttggcaatggaatggcagtggatttatgggcgctcctcggatacccctggattatgatcaaatcgccagccaaccacaagcggcctttacgccaccatcgcaacacgtcctgccaccaccgacgatggcacagaacgccgaccgacagtcgcctcaagctcagcggatagaagtcgcagagcattcacaacatctaccatcacaagcagcctgtcaggctaagatgttcgccggtgtggctcccgggttgaagagtgatgcccaaggaggcatcatgccgttcgctggcgtcataacacccatcgatggtcttggtccactgggtgagttgttctcccctattaaatgtgttcaaaatccattctctgtcctgcgtataaaatgtgctcatctatcgcactgtgacctgaaaagacaacccctttcgaccaaactatgaccttggaccggatggtcccaagcccggtcacgtctggcgggatctcggtgatcttcccatgcccgacccgcaggcctttgggatcgacatgagcaacaatgggatgctattcgatacctcttcggcgatcccatacgtcgggcaataaggtgctacccgagcctcaagaccaacttcgacgagagatggtttcctcccacaagaaaatgaaatgcccttccagcctgcattccaccatatctttccttccaatagagccgtatcaggcttcttgacacgaaatacctctgaatctttacgacgctacgaacaatctctcactcggccaatgtatcgttctttaattgtatcctcactcccgtcgtggttcgaaccatacatgtgtgtaaagagtagcagacttacactacttactctaattatgacgagtacgctcctcattttgcttccgggacctgcgtcgacctataattacctagctagctagatgttcaacttatttcatgcagctaccgcgacgtatttccagttatgggacaccgtcttgccttctccctacatctccaaactagagacagtcatgaggcccagcagatcagcttcagtctcgacgatcgcgtcgtttgcgtcggcgctgagcggagactatggaactcctcccttgacgtcctcctcggattcatactttttgcccgcggccgcatctgagaaaggctcttccaatgctgatattgacgcagccgaagcctccaactcgagtggaccttccacacccagagcaaagcctcacatcgtgctggatgattcggactctccgccaacaatttcagcagggcccaaggggaaagggtcattctggatcgcttcgacggatgacgaggacgaggacgaagacgagggagtgacgataggagaagaccgcgatacatggactgcaggtctagagaccgatcaaattctggagcgcctgtcgacgagctcaagagggactcttcaagggagcccagtgctggacctcgatggggctctgttagagctcggtatcggtatagacgacgtcgtcagtgaggatggaactctcccctccgaggacgatggggacctacaagacgacgagtggaacgaattggaagagggcgaacatattcccttgacaaactcctcgatacgtatggatgaggagtcggtgccgctgggtggacgtagacggaagcgacggaaatggagagaagcagagcaagaatttgctcgagggggtcacaaggaactttggcaggtaagtcggtataacaatggcgttcgcttccaggctctactcacgctcgacacattcaacagctcgttcctcctcagcttctatcctatcctctagcgttattgcccctgatacctctgcttccggcgtccttcctgtccggcggtgctgcagtcttcatcccggtaatcgcgatcatcactggcctgtcagcttgtgcgcacgtcgtaaccgtttacttgtccaggtgaatactcacgctgggatgaagcgacgggattgcgacttaccgaagtgccttgcactgctagatacctcaaggttaccaattttgaagatatcctgcataggtccgcaggaaaatacggcttgtgggcaggacgcggccttcaagtcgtcggaattttgtgcacttgcatagggtggctcagaagtaggcatggatggaatccccactcggacctggtgcttatcgcataccgacccctatagctatacacccgatttggctcacgttcctccgacccctatcgagatcaaagttcttggcctcgaaatggctcgtcctcatcgtttcgtcattcttcgttagtgctttcagtttctggctcctctcgatgtcttgctgatagtaccagctcctcgtcatagatgttaccgctaccaacccgggccaaaccctatgctggaatctcgctccttccagatctcttggtcctgctcttgcccatgatcgtctttactgtcatcggtcgcactgtcgagatttctgctctggaagaagcgacgccatatataccagagcctgcggggccacgttacggaccctttggactggacaatctcagtgccggaacagcccttggtaagcgccgtgtctgcgtctgttgtatcttgttctcacaactttgtgtgcagtcaccatcattttgttcaatactccacacgtgcagacgcttccaattcacggcagcctcgtcaagacgtctcggacttggtttccgctaccgtgtctcatcgcagcaggattgttgctaatcatggtactgccatactcgctcgtgccatactacctattcaatctacacgaagaaagcaccggtctcacacgcgcgggtatctttgccgtgatgcatcggccagaagtggatggagcgctcaactttgcgaggctttgcatgatcgcactgacgctaacgacggcaaatcaatgggtcggtcaagctagagcggttggtcttcgtgctctcggtgtggagcgggaaggtcgagccaaagcccagagatggctcggtttcggagcttggatcaccatccttttcttcgcttgcatcggaggatggatagccgatcaactagagatcgtcggcggcatctgtatcctcgccatcggctggttggtaccggccatcctattcgtcaagaacttttatatctcgagcccactggccatcgtgtttccctcgaacagtctcgcaccacaggcgagcgcagggacacgccatatcgacgagacgtcctcttcggtcgatatactgcttgctcgaaaggaacgggaactgcaaaagagaaggacggggaggcgcttgtggcaggatttgatcgtgttcatcgggatcctgcccatcgggttgttcacgatcgtctggctggtcttgctgtttttgggggtaaacatataatctctggtcacatttatagatgaaacgtggatgacaagcgattgatatgagtgtatgacaagtcgcatctataatgctttgagcctcgactttttcttttcgtctgcgatctttttggtcatgatctctgcgctcgagtgtttggtcagccgccagtcaatcgacgggtggaaggttggtgacgacaacgctcacctgatctttttacgcccgcctctagcccgatcgccgcaaagacgaccccgataccgctccactgaccgagcgtgagcgaatgtccgaagacaaagacgctcaaaagcatggtgaacaactttctggtgaccgtgaccatgaccaacgtgagactgccgaaatgagagatggtctcgaagatgaacagctggcctagtccgccgagcaaggcgtactgcaccaatggccagagtgcggaagggtgggtcgcgagaaagtgcagacactggaacatgaccggttccgaaggcgtgttgtgcatgtgcggcgggactccggtcaggctgaggagctcgggcaggttaaaggtcctcgcgatcgtgtggatgacgagggaaggccaggcgggtgggatcatcaagacagggagggagaggcacagcgtcaagaaggacatcgtgaacatgagctgtttgcccgtgaatcgagggtagagcgcgaacagctcgtcttgcgtcgaagccgtcagtccatccaggatgaggctgtagaccgaggtaccgtcagcgaatgacgagagaccacgccggagacatgaggattctcacttgaaaccgaggagcgccagtccgaaagagctactggagtttcctttgcccttgcccttgctgctcttgccaaagaacatgaacatcgagatcccgacgctgacaagcaggacgaccaagtatttgtacggcttgaacttgcgtcgatagaggacgacgttgaggagaaggactgggatgagtttgcatgactgcgagggagccaaagaagtgactcgagttagacaggatgagatgcaggcggatcggaaccttgactcgccttggccagcaccatcgtcggatagctaatgtatctcaagctcatgaatccgatgggggccgccagactctggcagatcccaactctcagcagcaacgctggcaaagtacgatcccagcttgtcgtcgcttcggtcttggtcgaggatgttgcagtcgccgcctttccggacccgttcatggatgagccattagaagccgtaggtaccgcctcttgctcccatccgactagagtcttgaaaccgcctcgacctccttgacggctcctttccacgaacaggtatatcagagcacacgtgcaagacgcaaaagcctgacatgtcgtgataaaagctgatgatgggaatctgtcctgcgaggtatggcctccgggatgcgataggtcgctgggcgagtgaggaggatatcgagggaagggtgaggccactgtcgatcgcgaaatgaacgtttagatatcagccccttccactgcttatcctgacatgctcgctattctaatctcacgtcgctcttgagctatgccccatagcaagtaagaggcatatatcccggctacacagaagaacagtctgtttcgggttagctacggtgttttgacgaatgacgttttcggttttacaccattgctcacctcagaacagacatgatctctctttctcgccaccctagtcagaggttgaatagtagcgagctgtacgctagatgtccgctatggtaaattcgagcggcaagtcagcctttgcacctacaacagttgaaagcgagtgcggtgcttgccgagagcgacgcgcaaaacgaatttcaaacacaatcaccaaaggtaacaagatgacacacaccctcgacgatgaccggaccacctgacctcgacaactaggagacaaggggagcaaattcgagcacatgaacaaggaaattgtatatatcatcattaaagggattcgcccagaagcgggggaaaggagggaaacacaaggtcttttgctatcaaaggggaattgtccatcatgcactcgagaaaccaaaaccggtcccgtccgtacggcagaaaaggatcgcgcactgaacgacgagggtaacctcccgcccgcctttggctccgtgcccctcttgccgtctctatgcgaaatacagcaactcaagaggagtggggccacggaaagatggggaacgtccgatcgaattgtccgtctatctatgcaaggcacgagacgatatctaagagtaaatgttcatcgccgttggtcgtcgtgatcctatcgagggcccgtgtctgggagatgcagggtttgcgtggtgaaagatgttgccatgaccatgtaagtggaagtgtatggtgagggggtattgaaacaaaaggatgggggtacgacagagtcgaggaagaaccgagcgatctaaccgaaccagcggcttagagcgcaaaccaaacggcgacgagaccggcgaccatcgacaagccgaggggcaaggcgacggtagcgctggcggcgttcttggcgttcgagctcgactctgccttgacaccggtaacggcgggaccactggcgtcgctcgtcgtgttggcggcggcaacctccttgactcccgaagcgggcagggcggcggcggcgagcatggtctgggtaccgatctgaccggatccgaccatgacgtattgaccgtgggatggaacgccgtcgaggaccaagaacaacatggccggtcccggggtaaagagggcggcgttgggaggcatctgggtgacgtacaacgtcgtggtcccggcctcggtgtcgatctcgtacgaggtgatgagttcgaggaatcgctgtccaaactggatggcatgagtagagaaccctcctcggatgacgttgaccttggccgacttgacggtagcctcgtcggtcgtgttcagggtcatgctccagtagtcaccaccgtaactcaaggtttcggggaatccagcgttaccgggcctggcctcgttataccagctggggtaccacctttcgaccgagtagctggtggcccacttggcgtacgaaacatcggcgttggggttggatcccgagatcaacaagcttccgtccttgaggaggacgacggtcgagtggtacaacctctcctgggtcgagggagccaagttccagttccacttgctaccggcagcggcgttggggttgtagagaccgggttggtagaggggttcgttggcgtacgattgaccggcaccccaaccctcgtctccgtatccggcggtacccatgtgagcaccgttacccatccaaagctgaccgtcgggcaggtagacgaattgacccatggtccttccggtgggcaagaaatcgtcgtcctcgtacttggggttggccgagtcgggcgagatcctgacgcacgagtcgtcggcggcgacggcggtgatgttgtacttgattccaccatcactaccccaatcggggggagcgctacctccacagaagagcaaggtggcctggtagttgttggcaggggtcaatggcaacatggtcgacgcggccgatgcggggtagactcggacggcgtaaggcatgtaagggagatcggtcgtctcctgagtgtgccaatcgtacaggatggtgctgtagttggcttgcatgaagagcttgcctgcgagggtcgagcgggaggggaggggaacgatgaactatcggtcagtcgcgacatccaagcacgcaggcgacggctcgactcacctgaaggcaacatccaggtcaaggggtacaagttgacgggcaggttatcggccaaccattgcaagtgaatggcctgaccgtcacccttgggggggaagaactcgtacgtcgggttgtcctgcaagacggtgttgacgtaacctccgttgttgtcacctccgatgacgatcaaactgccgtcctcgagggactcggcggtggggtaccaacggttcccggtcatctgcaggtatccgccaatgttggcgtcggtgtccttgcggataaaggtctgggtaccttgtcggtactcgcacgagtcgtcggcacagggttcgagcactcggatggctgcacctccgtcggtattgtcgtaagcgccggcatcggtaacagcagcaccgcctgaagattcacgccgtcccaggtcagctttccattcgacgactcttccctcccgtatcggcatgatcggcggcacgggggggggggggggggacttcgacttacccgtcgtgataggctggtttccaccaaagacggcccacgatccgttcccgagtgacattcctccggcacagaacgggttactctcgacgtccatcgcgcggacctcgttggtgaccgtgtcgtacgagacggcccacgcggggtgttgtcgaccggtatccgaggtgacctggagagggttattctcggtcttgtcgatgatgtagaccttgtcaccgacaccactgaagacggaggacgaggacgtgaacgcaaggaggcgaaacgatcagccatcccgcccatccagtccgatcaaaacaaacccccgcccctttttcagacgcgggggagttcgaggacgactcacgggttgaacatcatttgcgcagatactccactgttccctacgatctggaaagtctcgggagtgatggcctgttgacgcttttgcgatcctgatcccgaggcggtagggacggccgaggtaaaggggatgagggcgctggtgagcgcgacgaggatggtgggaagcgacatggttgtctagtcttgacgaggtgaaattgagggaaggcggggggggggggggaggttgtgatgggaggttgtcctgatgtggtggtggtagaggttggtggtatgcgttgagcagtagttgtttgtagtcgcagtcgtagagaagagatgtcttgatcgatcccgaaccgggttgatcgagaacaagtggggggtagacgaggtctttgtttgtttgtgtgtttgtgtgtgggtttatgaagagaagataggtagtgtgttgatgatgcacacggccttggaaactaggtgtaagtatatagatggtggtagtgattgatgatgatgtgttgattgtagttgatgtaagtttatgaacgagaggtcgtaacgatgtggcgagacgacgaggaaaggctgtggggggggcgagccgttgtgtgtgtgtgtgtttggatcttgctattctcggaacggacttcggcctcgaatcgcgagtcgatcaagggaagcgacgaagagagcgaggatcactgtagacacaggaataggtagagagaaagagagagatggcttgtaggatacgtagaagagacgatgccgatgtaaccctagatgggatgatgatgatgatgggatgtctgggctctgcgatcaaggaaagatgtcgacgacgtcgtccgtcgatgatggttttccgatgtggcggctgtgtgcgacgcgatgcggtgtgttttggaattttgttttgtttgggtcaagcgcgggtggaaatgcccgagggtgagggcaagggggaggggagagaaagggaggaaaaggggaaaggcccccccccccccgaatagatacaagaacagataaaccaaaacgatcgaccatatcttcaactcgtacaactcgtacaactcgtacaactctcccatcgacctcgcttcatcccgttctacctctaatcctcgtcccagttgacctcgtcatcatgtcatccgccgctgccatctccaagcccaagcccaagcgtgagtctctacatgcctcaaccccggtccgattcgcgttcgcgttcgcgttcgcccgacccgaacgcacgaaatcgtatttcgatttcctctccaagtgtcgcgagatccccggccgcattcccgtaccacgactagctgtgaccattcatcgctgacctgatgtcattcatctcgctcttctctcgatgtcttgttcgttacggaccatgtcacttctggatgggaacgccgaacagctttgccgttcgtctacacgttcagctttggagctttcgcaggatgtaccgaactcatgctcctcttccctctcggtgagtcgctctcgttgtgcccatcatcacaccgtctacccatactcaccacctccatcccttcttttccctggctgtgctgtgctgttcaccgtgggcgttcccctgtagacacggtcaagacgcgtatgcagttgaacacgggcaagagccagttcgggatggtcggcatgctcaaagacatcgtcgccaaagagggtgtagccaggttgtacagggggatcttggccccgttcgccatggaggcgcctaagagggctaccaagtgtgagtaactcgtagggtagcgtcgaggtcgggttcgaggtccaagccgaagtcgaagtcaaaattaaagtcggggtcggctgacccagccacgaaatgtccgtttttattgcagtcgccgccaacgctttttggggagacgttttcaccaagaaatccaccatccccatgacccaatccgtggccgtcctcaccggttgtgcagcaggagcgaccgaatccttcctcgtcaccccgttcgaactcgtcaagatcaggttgcaggacaaggcgagcacgtttaccggccctgtcgacgtgctcaaacagaccttggcgaggtccggtccgttggggttatacgtagggatggaggccacgttctggaggcacgtctcgtggaacggaggttactttggatcgatcttccagatcaggtcgttgttgccaaaagctgaatccaagtcgggagagctgttcaacaatttcctctcgggttcagtgggaggagcgatcgggaccgccttgaacacgccttgtgagtttgggggaattgcgccagaggacgacctgggacaagggctgacgacgaggtggcctccgcgtagtcgacgtggtaaagtcgcgtatccagctacacgggaccggcgagtggtaagtctctctcgctctctcattcgagtcgcgagtcgacgccgtgagacccaagctgatctcgatccctcgtcgtcggcgattttcatacaggactttccccgccatcttccgagtggtcagggaagagggagtcggcgcgctgtacaaggggttcactcccaaggtattgcgcttggcacccggtggaggagtgttgctcttgggtgagtccgcttgggccttgcgagagagagagagagagcggaatgtcggttcgtcaggatggctaggctgatcaagacgtcttctcgcgtgcgatgcgatagtcgtcgaggctctgacgacgatcacgaggaaccacttgggacctccttacgtctagaccgccaaacgcgacgcaggcacgggaacacctcaaaagaagaagaaaactgacagttgtatcaagtcgaacggagaattatcaaaaagggacgagcgcttcgcattgattcgcacctcggatgcgcgacgaagcgactgaatcgaggagcaggagggagggctatcgagggcctagaacgcacggacgcgacgaggacgtatcatcggtcatttgggtttcggtcgggactggcgggaagcttcttgtttttgcatgcatgcgtatcggtcgggtttacctgcttttcgtcattctcgtctacatcatcagtcttgtcattcccctagatggacgtgtatctcattccttatattcgctatggccccgttctactggccgttttggagtcgctgtcttgaccttttgctagatcagtaccgggagattgcacgaggctgcgcttgtaaagccgcatatcactgatccttctccctctctttggccaacgtgttgagcgcttcgaccgcctgtttctctctcctgcccaactcggcctctttttcctccaaaagccgttccctctctttctcgtcctgacgcttgctcgcactcggtcgaaggacgtcgacgatcccgcggagtcggtcatgccgcttgcttccggacgaggaacgccttggttcctcgtcatccgtaaactggtccccggtgtgcaaaaggagcagacggacgagcaggtctacggtctctcgttcggccagcatgtctttggcgaggaaccgttcgatgagactgaggtctgagaccgagagcccgttaagttggggctcttggttgatgatcgtcctgaggagttcttgaaacgccaacgtctggatgacggccgggtttgccggtcgatggtccgggtggaggtaggcaaggaatctctggagaggggagttcgaggcttcgataggcggataggaagggaatttgagatggatgacagcctctggttgatcaggctgacgtggtcgagatgacttgtcagcatcacttgcacgtctggacaagatggatcaagtctcacctgcgatgtcttacccggctgtggaacgagatgaactagttcggtagtcttctctgccatctcttttcccttgaccactataccctgagtgcttccattccttgtcgccaagatcagagccaacgctgagatgatcagcgaggcatagatcaagaggtcgtggatcttggctttgtacatgacggagcgaggtttgcgcggaagcggcacggcgggaccaagcggtctgacgaagatgggcggagaaagggagcgctctccggtgttttcgggaacgtatgtcggtcgactaggtgcgggatgaggattgggcaaggggttgtcgctggtataaatctcgtaccgctcagctggggattgctccatcgctcagctagtgcccctgcagaaatagttggatcgatatgtcgcgctccagtcgccccagacgtattgcttatgaggctgactggggttagatcgttatatattatatatattacataccattctgccacggtcctttgatcatcgtacgtcgcagctacaaaagacaagaatttctcatatcaaagaagtcgacaatcatttgacgtcattttgtggatcagcatcgcgggccggaaagaattttcgcgtttcacctggacaatggaatcaaaggagggcagacacgtacgatctgttcaccagatggatcccagcaagaatggttcatacgacgtcgatcgctttgctgatttggagtccaactctttgtatggttgcctcctatttgtaatgtctcttttcggagctacaactccagtaatccaaaaacgctgctcaacgttcattagcggatagcttgggttattccactgtcgggtatgatcagatgcagatgaccgcgacccaaagaaggccagtttcggcatcgaaagctattactaccagcaagggatggcttggcaagacgggatttttgcttcacggagaaagtctcgttcaatccatatgacaatctggaagaatcacctgaagcgactttcggtcctgatgcatttcctagtggtctaattgcagaaatcttacacagatacagcaaatcgtcccttttgaagagccagggtaatgtgaagcacaaatgactcggtggaatgaaggggttgggcgtaatgcgaagcgctgagtcaggcaccgtgactacgagactgagaccatcgaagtcgatataacctctcctgcccctgccgcaaatgggtttcaggcaaactccggacgaggtcgtcaaaaccttgaagaactgctcggtcgcaatagttcaggaaatgggaacaactgatccgtggtcgaatcaacagattctcaaaccgctacaagggcttccgtcatatcggacaagccattctctttatgcggcggtaattcgcctcgactgatcatggacccatgtcccctgattctccgctttagaccttgaaatactgacaggtgcgcaatcgtccttggcgcgcctaccgtccttcgattactacgagtacaataccccgacgcgacgcgacagtcgatgtcgaccgcctcccagtagagcatttcagaccgccttcttgctctccttgacgtcgaccttgacgccgtctttttccgcagcagccttgtccgcagcctcggcggccttcttggcctttcgagccttgacgtgggcgacgctgggagatccgtagaggacgtacgccttggtcgcgtagatgaccgacaggaagaggacgacgacggaccgagctccgagcacggtcatcaggggtgcggtggcaccggaagaaacgttcttgctgcccactggggagaggtaaggcaaagttgcccagtagttggtagcgttgatatagaccgggtgggaggaagtgagcaggccaaaaatgacggacgaagcggcggccgcgaggaagtctagagatcctaagaatccagaggagagaataggaggagtcgagatcctccattcgggggaaaagacgccgagggtgcttgcgacgattccaccaccagaagccgagatcccaccgagcacgatctgatacatcagcgagttccgaatcagagggttcgaatgggtgctgcaggccaagacggcgccagagatagggaaagctcgggtgagaccgtcaatgagggggacgacagtgtcgagcgtctccgaggtaggatggtaaggcgaaatgtagggagagttgatgaaggcatagacggagatgtaattcaggagaggccaggcgctaaggagttgaggtggaggggttcccatcaaaaggcagttcaacagactaccaccccacgcctatcggtacgcatggtcgtctacgtatgagcagacgtcgaaactagagataagccgcgtgaggtactcaccatggccaagtatcctgccaactccaccccgagacctcgagccttcatcgctccctcgtgacccagagccttgacccttcccttgtaggcgtgagaaaccctgagcgcatgaagcgtagtcgccagagggaagggataaaagtcgggcgacagcgggaccgtcgctgcttcgacgacaagggcgatgggacggaggaccaccagcccgagctgaaaggccacaaggaggaccttttgagcgtattccgagatggcactagtgtctgacatcctgtttcgtatctctatggtgctctcagtccaatactacgatgagcttgaacgtcgttgtgctgggtaggaaggttgagcgttgatgatatttatccgctgcggctggccggattgactagatagacaagtgacagaagcggggaagcggaagcggtcccgccggaagtaaatcattcgggatacaaagttcgagatccggaagcaaattgataaaagtcgggcaacgtcggacgagtcgatcgagtcaaaagttggcatatcacgtcacaaagtcgagcatatcatcgttgtatcgaggcaaaagtcttggacatcgccactatctctatcacatatctctcaaataaagtgttagagcagcagaatggctcgaataggtgtactaggtgagctgtctcgcttgcaaagtctagccttccgctctagcttatgggtcgcctcaacaatagctcttcagggtgcgttcctggaacatgccaatgctatgaagcagtaagctgcttccccgtggccctcctccaggttcacccttgttgttctaaccagcttcaccgcgtagggtcaagtcgacgtacggctacgacatcgatgtcgtctttgtcaagacggtcgaagaattaagggcaagtgcccaccaagagccctgacgtcgatcgtatgacctaactctgtccgcgtcgacttcatcagcaatgcagcggcctgatcattcctggaggagaatccaccgtgatgttgaatcaggcccgcaactctccgggactcatgccggagcttcagaagtacctgcaggaccctagtatgccagtctacgggagctgtgcggggatgatcctgatggccagcgaggacggtgttggcggagggaagaaacctcagaagggacttggagctatgcagggaatgaatgtctggagaaacgcttacggaggtacgtcccgcacacacatctgttcgcgacttggtttcattccgacctctcgctgacctcctgtgtgtatgtgaaccctatgatccgatagcccaaaacgaaagctttgaagcaaatatcccctttcaaggcttactaaaccctgaaatccccttccctgcaatctttatccgagcgcctgccatccactcgctcgtctcgtctaaatcgacatcaacatcgagcggctcgggcaaatcaaccgtacgggaagacctttgcgttctcccttccgagctcgtgccgcatattcccgaaattgcaggatctcctctcggaccggctgataccgaggctatgaggatcgtggccatgaagcagggcaagaagctcgtgacgagtttccatcccgagttgagcggggatctgcgggtgcacgagttcttcctccgagaatgctgcgggatggacgcagatgtatgattaaaggacagataccggaggatactcagccaatgggttgtcatcattggttttcgcatatacgatagatgacaagcatgtacactaagggtcctggagattcgtgacctcgtccaaggcgtccgtagtgatcgcgatctctgcctcgcccgctaacaaagcgccgtctattgggacatcgctcgcctcgagatgtccctctgtctgtatggctactgcttcatccgtctcgttcttttctggagagctgttgtgctgatttgcgagtctgcgattcgattctgtctcctcgaccatcgcgagcaaagtgtttgcctccctcactggcgattcaaccccggtattgtcgatgtcgtccggtcgaggaggttgtacttgcagaggttgattgactggccgagggtcgctcgagtcgctgctaaacatgtcccccagccgaggcgcgatgatgtcggcattgacatagtcattgagcgcaaagtggtacgccgatcggttgtcgaggagagacgtcgggccagcatcgccctgcagcattctcaaggccgcggccgagtgatcacgctgaagctcgggatcaatgagtggcaccggggccgacgagaggttcttcgcgccggtatgtgtcgttgcaggtacggactctgaggatggcaaggcatacagaggttccccatcgttcggatcttcgtccatgtactcgtacttgagcacgtcatcccactcggctcggcactcctgcgcgtgcaaatctcaatcgcttgatcagctatccgaagtgcccagaagaagtggaacgatgtctcacctcggtagtcacttccgcctcgtgaacattttttgcgctcttattcacttcggttgtgacgcggtcccaatcggccttctcgacacaaagttccacaccggtcttccataactgcttcttctcttccagactccatggccacgaactgttgagctgctgaagcgtaacgaggcgacccttgataccctgggccttgaggcgggtgtattcgtttgcccaggtttgtttgatacgctgctcgtgtggcggagataagctgatggttgacatcacacctggagcatcatttcacccacccttgtatccttttgctcgtgtggcaggctcactttcgccacgctgtcgaccaatacttgccatccgcttcccatcaacgttttcaagagcatcatcatcatggtgacatatggctcgaggctgacccatctcctcctcgattcccgcttgaggcgctgtgcttgtggtgaaacagcgacaccttttccggatcttgaggtccccgctttcggcatcgcttcctgaaggggcttgcgtttccgagctcgtctacgccttttgccatcgatatcgcttggagtcgattcttcccctgccgtatccagctcggccagggcttcgccggcagacgctctctgcgtagaagatcttgagtagtcgctagtgggagagtcagggcggtctttccgtttgccaaggacggaagatgacgatgtacttggtccattgagctgttcgggtgagcctgggacagtgtcgtcagccaacctgccggatccagcgccttgggaagcggaaggtccagacagaggtttgtcaggttgaagtatggtagactcgtcgtttccatcactgttctcatcggaaaccttctccgcatcatccccatgtgtggacgtggaactttgtatgtcgagagccttaagatcttctagccgtcggctgcgctctatctgcttcatctgatgacgatgcagcaagtctgccatggtctgcaactgactggccgaggtcatcctgttgggtgacatgtcgtcatcgatagataatccttcctggttgtgggcaggtgtccctggcggatattcctccttgtccccttctttcctaccttcagcggcctcaagcgtaggatcgagcgtggagacgggccaggggtcgtctagggttgtagctttggaatcatcgcctcggatgccggcactcgctgtatccaatgattcctcgatcacatatgagacgaatggtccagcagcatgcgggagggcctccccttcatcatcgagatcaggggaaggcatgaaagctccagtcgattgcaagtgggtgtcatcggtttgggtcacttgaatggtgttgtcgctccgagaaccatcctgattcaaggcgttatcagtaagacgatttgccagcccagatacgttgtgagcgacctcaaggtcccggatctggggatctagcaggagctcgtcttcgtcattgtccgccgccaaataccgctgcatatcagcctcgtggatgtcatgatccatcatatgggccatttcaggggggtggaggttggtgtcgaaaagctgtttgtgaagggcagtgaggttgcggcagggggtatgactcggtttcaattatgaaacatctcgactaggagggagcggtcgaacgctgcttagaatgtcgatcgatgttaaggaggtggtcgagccgttcgcaatcgggccggtcgaattctttaaggtctcggtcccgatcgtacggcatattgtgattcgatcacgtgatcccgttcgagacgatcgggccagcttgctctttgaacaagtcacatcattttgcgcctttcttaaagtatgactggcagaatggatacaatagtttctcatacagcgacaagatcgataggcccggtaccgtataagctgagcttgaaagatccccaaaatccagaggaataggttgaagcgacgacgatgtatatcccaggctcgaagcgtgtagtcgggatgacgacaccagatatggcattagagtaaggccctgaagagacgacctgatcccctagcactcctccgggattccgcctgaagatagtcagattgatcggcgtgtcggacggctcaactagctgtagccgcgcactgcgtttgtctggttgttcagtctcgcgatcttacccgccacaagaatctcgtcacgtacaaggcagaaagaggcgccgtaacgagaagctcatactttggattactgtcataatcgcccacagagggtcttccagcggcgttttgttgagacctagggggccgcggtaatgcaatcggtcagctgtggaatgatttccattctccatgatcgatccggtacctaccaagaccccttgattactcgttggtgcatcccagcgccctcttgaggtatcgccacgattcccactggcaatgaggcttcgactacaagctcaaagtctcctactttacctgcttcgaaggttgataccgtgatcgtgtagactcccgctaagcggcaccagtttcggttagctatctgcgattcgatgacaatcttcggaagctggcgattttgactgacgagatataccatcggcctcggcgtgagccattccgcgcctgtattgtttcgagcccgtgacgatatcccgagactcgtagctgagaggtttatcaatcgcatcttgagcaagctatagtgaatcataccggatgggaaggaaaactgactcggtaacccgtttgccattccgagtgaccttcacgtccaagggcagtttactgttcgtactagacaaggcgattctcagattcgcgtcttgcttgtcgcttcggctttgcagtggtcgaacgtcgagcttgtattggggattattcatgtaggtaggcaaggtgggattcccgccagccgaccgctctgtgaagcttcccttttcctgtatcaaagagcatcagttgggcgatcgtagataggtttgatttctcctgaacggaccatgatctcgtatggtagtttcttagcggcgtgtttgaagttcagattggcatctgaatatgcgaagatgctgtacgtcgtcggtcgttctttgttcgattcgatgataggagcaattttcaacacggctctctcgtgcagacacgtatgtttgaactggcaagtggaatttgctggtcaagtgcagaaccgccaataaagctatcgggttgcggcttaccagaatcaagggactgtccaagaaatcgacctatgacaccaatctatcagctaagtacgatgtgattcagattgcatattctcacctggtcggcttgttctactttccaagagtccgtgagcgatgcatcgtcttgttcatccacatgcaaagcgatggaaggcttctccatcgttttcgcctcgtcatcggaaaaatgtctgaccaggagcaaccacacctcggcaccaggcagctgagattctacttcgagcgtataggtcgatcggccgcgatgatcggatcctgcgtctatgcgtctagccaagacgaaagttgtagcggttcaatcaaggtgcttgtgtagaggaacgagccggagcttacgagtgtatgtctctgacattcgcaaagacttgtggattccagttcagctccaaggtttcaaaacgattgcaaacttcgtcccaggaaaaaatcagggtatctgcaaaacgacaccgtatttggtaggcaggcacacaggagagatgagacgagcggcttacgaggcgtttgttcttcttctacaagagtgttccgcaggtcccgggtccattccgtgtgcgaagtcgttccgacaatatctgccggccgattccgcttccaaggattgtcaacccggactctccgtcgcccatccgtctcctcccacatctggctgacgccgtaagcgtgcagtggagccagacctgacgttcccctgacattcctgccggtgcctagtgcaacgaggcaagtccccctttctagcccctccaacagccgcttccaagttcgctctctcctgaattctggagagttgaattgtagacgttctggtatccaagaggtcagggtgtacaaatccagcgaagggatcgagccaggaaaatcgtatcccgaatgaagagtcatgtatgccttttcaaccagcagcacccagctattagccgagtcaatgatctcttgcagttctggtcggatgggctcgtcttcggcttcggcgtccagctcaggatccccggtggaaggaagatcgcgcacgacagcggcgcacaagtgtgcatcggaattattcgtttggggaagtgtatcgtctatgacgacctgttcatgagatcagcgacgatggcgacaccctgaggcagcaaacctgactcaccgctcgccagctgccattgacgaacatctttgacttgtaccactgcgatgggtctccctctgggtcttgactgcgagaacctaggcttatcggctcgatgttgttctctattaactgaaatgacaaacggggtaatcagagcgggatcttgccaccgacattgaagcacaaaatcgaagctcacgcgacggttccattttaagttgtgcttcaggcatagctcgagccctacaactaccgagcagttggctcccattccctgctcaaccttgacagaatgtaacatgtcccgccggtcaccgtccttccgcaggctgttcaaccttgtaccggaagcccgccatactggctgataagcttgttgatcctgattcagagcgggccgtctgccgtatcgcttcgaagggccggcctcggcggagatggtattccaccacccagtagatcgagtgtcattccatagcggcaagttgataccattgacagcgctagattgacgtagaagactcgtgtgcatcgcatccatgtccgaagctgaagctccagccgcgatgggtcgattgacgacatcgtgtcctagccgtgacacttcgacgcccatctccttgatacgagatttgataagcttgcctctttccaagcatagtctccatttcttcttggcttcattcttgtcaccaatctcaacatcctgtttcgagctcgtcgctacgaacgagatgggctcggtgaatgtcgaagatgggacagcgagcccagaggcgagcagattcgaccataactcggctgcatgcaggtaggcaggaaataccctctcgctaaggttgactgaagaatggtcaagactgtgttcgagcttgatcgcagaggtggtagcggtctgtatacttcccgatgcgaacggtcagctccgtgatctcgcaaccgattcatagtcgtcaaatgggactgacagatgcttctacgtagcctttcgcccaagtgtggtaactcatgcgatctcgattatcagattagagcgtattttgatccgcctcttccccatctgcaagaaccgacgagacaatgggtggtcaatcgttgaacgcatatgaggctcgatgacgatcccggtctcgggcgacatcggaaccagatctggttccgggtgacggtggccgggaacccttatgcacgggtcacctgcaggtagctggcacagatggcagcttgacatcctgtcttataagtctcttaaatatgtacttcactgcagctttagagagcgtggccctcgaatgttcgctggttacgaacgaacggcctggcctgcctcggacgctcatcggcgaagaagaagaggaaacacgaccaccgcgattcgattcgtactgaccgaaaaacatcgtgcattcggtcttttctgattatcaatgatgctgatccagatcgagtgccctcgtcatgatgaagaaactgtgctgacatccccctaacgaatcgctctttgagtctagactccattcgctcttcccctccatcctctctcatgctctgctcccgccatccgctttcacccctgaacggccgagtgcgtgtcgattaccttactaccagccggcggaaagggatatcatgttcagcagaggaatatgatcaagtcatggagatatgacccaccttggcttggacatcgctagcggcctgctggacggcccgcttggccttgttgttagcaccggccttgtaagtagcccggtagaagctacagattgcccaatgtggtcagattcggaatttcattgggcgccgaagtacgctcgcactcacgcgatgaacaagaacaagtagctggtcaagagaccgacaccgaagagagcggccgactcggatccagcacagtcacccatgttggggaggaaggagaatcggctcatggcaaagtgggtgtagcctacgtggaaccgagggaacgaccgcgtcagcttgcgatattcattactcagcgagagtagtgtggagcttactagcaaagtagacgacaaagaggtcgatgacaaattgagtgatctgaagggtggtaaggtacttcttccactgtggagaccgcaagatcagcctccatttcattctgctcaaggatagacagtagctgtgcttacccagatcttggcaccaccagcggtcgcgtagtagtagtagtctggtgacccgatacaatcccgtcaactcatgtcctttgacaccagcggacttccgtttcgaccgtaaactcacacatgataacgtgaacggtcaaattcaaggtgatgacgacccattgctacagaaaaagatcgcgcgacgcaaacacgatcagccgaatgctctcattgctcattgccgggacggcggaacactcacgaccgaagtctgaccctcgagctggttgaagcagaggacagcggtagcggcgtgatggaagacgtgcaagaaagctacagtgacccgatcgattcgtcagttttcacaatcccgccgacgcagggtccgctctttttggcacgagcgggacgtaccgagcttcttcttcttcaagacgaggaagacggtatcgatcaattcgaggtacttgaaaaagtagttgaccatgtagaacgagacgagcctctatgacgaccgcccaaggaatcacggttcagcagggaattcccactttgtacgggaggaggtgacgggtttgctcacgggagtgaaggctttcgtgttacagatggaccagaaagctccgtgtcgcatgtaaagcgggacactattgaacggcccaagccgtacgcggcgcgacgaggaacatgcgattagagagatcaaggtcagtccggatggtcaatcgcgttatgtcgatggataactgacatttcctcgagcatgaggaccaggagcaacaaggatcccgctgagaggataacgttgtggatctggaacaaggcttgcagcttgaacgctggtcggttcctagtcgatatgaacgcgagacacacgaaggatcagtccaccgagatgacatcgtctcgctctgctcgtagtaacggccgcagctcgactcacctcatcaactccctgcctccaaagatgatcaccaggtaggtgatgatggccacgacgacctctcgcgtggtgctcaacggggttttgcccggtacccaatgtgttagctcatagctgggcttcagcgaatccggggtgatcgaagagaggagggtgaagatgggaccaggcttgtcaaaagtgaacgggttgaacatgatggcgggctaggtgattcctatcgaaagaaattccggtagtgatgtcggtctgatccgtctgagcggaagttgtgatgctaaaaaggtctgtgcttttcgtcctcctggttgaaacaagtggatgggattatgatacgatagccaacgggtgtagtatcgtctgatgagggtgttttccgtcgaacggtaggatagaggtgatggggttaatgagcgtgtaacggttcgacgtgatgttgagcagctcgatagtcgaggtgttcctgatgaaaaaggttttgacggatgattggtttctggcctggatcgcaacactagtggatacccggaaggagatgaagaggtctcgctagaagtatgagaaagacagaagcgggaaaaggaggtacgtttgggattcggaccggcagagatagtgaagatgactggtgcccgacgtcgttaatcaaagcaacgaggaggaggaggagtctactgagtggatgctcgaacgaggtagagcgttggttggtgttggtcgtagtggtggatggtggatgttgtggcagagcttcggtgtcagtcgttcgctcagccgtgatgggccatcgttgcaaagagacttttttgttttgttttgggtgaggaaagggaggggggaggaaaaggaaagggagagagagagaggggcagaggcagggggagacggggtcaacgtcaagtccaagcctctgaagccgagctgccaacgatatggcatcatcaccattatcatctcatcatcgatcatcgaatggtgacgcaaggggtcgctgcgtacatgcatctcgaaccatgtacatcgtcacaagctcatagacacaatcaagcaatacatagaacctctaatcggcgctgattgaaaccacactccaagtttgccatgtcgccgacgctcctcgaagcacaaacgagcgcgttgctctcgctgctcaacctcaacgaacaacaaccctccacttcatcgaacgctgggacccgcccgcagacacctagcaacaacgatcacgctggaggagccgcaaatgatttgctggctttcgagaagggaaagaacggacctcttgtctggaaagtcttgatcttggacgatcagagcaaggatgtgctggcgaccagtctgcgagtgcaggacttgcgtgaacaaggggttaccctgcatatgtaagtaccagtctattgagctacaaatgaatcgccgcagtactagagaattcgacgatggcgcttcaatgactgaccatatgctcgtcacaggcagctacataccgcccgaccaccactttcggatgtacccgcgatctacttcgtatcacccaccagctcgaatctgcgacgaatagctcaggacattgctcaaggtctctactcatcatatcacctctctttcacctcttctcttcctaaacctctgatggaggaattcgccagcgctttgctcacgcacgacccatccggagcgctaggtgacaatgtcgctggagtctgggatcagaacctcgactttatcgtacccagcccttccctgttctccctcctacccaagcgtgtccctcttcccgatgcctctggatccaaccctgccgcgaaacgaccgacggggaaggacaaggaacccgcaccgaaagagaccgatgccccgccatcttatgccattctcaactcgccgtcagcgaccgaggtcgagatcgaggccgagtccgagcggatcgcccgaggtctctttagcgtcgtcgtcacgctcgggagtgtccctattatccgagcgccccgggggaatgcagccgagatggtcgcgaggaagctggatgccaaattgcgagattgggctagcggagggggtgcggggagaggttatggaatggggggagacgcgttgagcgggttgaacaggccgtgtgagttctcgctcgtcttgaccctgtctcttgatacgtttgagcttatcgaagtgattcccttgctcttcagtgcttgtcatcctcgaccgaaacgtagatttgatcccaatgttgtcgcactcgtggacttatcaagctcttgtgcatgatgtcttggaaatgaaactgaaccgagtcacggtcgaggtcagtcaactagaacgggccgctcgttcatcctctgcctagcggtctgacctgaccgtcatgctgtcctgttgcagtcacccgagaacggcagattgcaaaagaaatcctacgactttgactcgaaagatttcttctgggccaagaatgcgacaatgcctttccctgccgttgccgaggatatcgacgccgagctcaaccgatacaagattgatgcggccgagatcaccaggagcaccggcgtgagcgacatgaatgacgtctcgcaaatgtgagcatgacaggttcgatggcacgttcgtcatcggctgatcattggtaccggctatcacagcgactttacgagcaacgcggcccatctcaagacggccatcaccgcccttcccgagctgaccgcacgcaagcactgtttggacactcacatgaacattgcgacggcgctgttacaagcgatcaaggagcggggactcgataacctcttccaggtcgaggaagcagcagccaggcaggtgagtcaccttgagatgcacgggacggcgctctcaagcggaatcgcactgaacatcatcatccatatcttgacgtggttcccgacagacccgacaaaccattctcaacacgttgaacggtgtgacggaagacccagagactacagccaagcctacaccggaggatcaacttcgattggtcatcatctactatctgaccgtcccagacaacgcgatcagcaaggaagatatgaacgagctgacaaacgtgctcaagctcgctggggctgatctcaaggcattagactatgtcaaaaagtaagtcggatcgctactctaccgcacgattagtcactccgctcatcgacgatctgctcgagcagggttcgagagattaccaggatgacgatgatggcttccgctcctgctatgccccagcagcaaggcggggctctacgtggcttcggtgtattgggtaacagggtatgtcgggcaccttttgccatatagttacacaaaggctgatgtctgtcgatataccgacagatcaccgaacgtctgcgagaaggaggtattaccggagggttcgacaacatcatctctggggtcaaaaacttcttgcccgctcgtaaagagttgacggtcactaggcttgtcgaggcccttatggatcctgcaaccgctaccacgcaagcacttcaagacacggatgactatctcttgttcgacccgaaagcgacacgctcaagagcgggtcctcaatctggaggcaaaaaccggatgcagttcggcgaggccgtggtcttcatggtcggaggtggcggatatgtcgaatacaccaacctgctcgagtgggctcagcagagaggcgccaaggatcgagacggcgcatcggtgggacaagggaaaaaggtgacttatggaagtaccgagatcatgacgcctaccgcgttcctcaacgtcatgtctcaactcggtcaaaattagatggcactatgcatttcgacgatacctttgtacgggttgtagtagtcttggccgtcataccgatttcgatccgcatctcgcatcctaaccttcggatcgacttcatcacaagagcatgtagattggagtgtgttggcgctttcgagaagcaccgtgttggaagtcaaagtcctagtgacaacatccacacggctcggtatgcttcatacctcaagaagccacgttgtgatcctcacctgtccctctttacggacaggagtctcgaaagagaatgtgtctcccaaaccataggtgatgataccgtgctcggatgtcatcctgtgatggccagtccggttactacaccaccgcctacgtatttgcgagtcgcttcacgctcatgatatgacgaatctgttacgtggaccggtacagtcgacttgcacatgaagagcaccaaggcagcgagaaattagcaatcactgtcgatcggtgatcccaaaatgctaacaccaaagagcgatctcgttagcactctcaataatctcagtgtcttgctacgttcgatgatccccgagtcaccaccgtctctgatctctgggtgcccgtttccgacggagatgtagaatcagcttgatgtccatgaatgacgaaagatgacgagaactttgatgcgcttcctttcgacgcgcttccttttcgtgtccgtctggtgcttcctaatcgggccgcaatcgttccccccttgacgagactcgccccctgccagcgattcaaaccgatacgactatataacccgcacttacgacattaccataaccagccctccatatcgtgcctctaagatctccttcctccttgtggatcgcactttactgagcgccttcaccccctcgccgagacactaagatcaactcgtgtcggggcgataacgacctaaacagtgagtctcgttcgccttcttccaccctctttgccgggaaaagaaaagtcgaaatcgaggaacggctatgaggacaagtatgtcgccccagtcctacatgcctctacaccatgatgtgcaagacgcaatgcggatccgattacagcactacagccaattgtgcacgactgagcctcccacgatttcgacctttcttttctccggcagagataaagcttgtgatttcgtcgaataggttcgctaaacaaatcgacctgacctatcagacagatacttaaccacttaacatacacgataacgcccgcctgacgttcacgaaccgacctacgaccagaatcactcgacaggtgagcgtcctttactttgcttgtcaagtctgcattccctttccctttaccgaacgcaatgatccagacaactcgtcgcacgtcgccgaagatgttaaaaacttaccatgctaatgctgcgactttcgagtcgataatgaaaaaaactttattctaagaacggctagctgaggcaccaccgaaaacgagagacttgtctggatcattcgttgactgtcatcgcagataaagtcgaacaacaaactgatccttcttgatctcatcgtagactcaggtacacctaaaacaccacattctcgacaatttgtcaccatgtctggtaagcctgcaacaaactttgcctacctttcgccgcagtcgcttatcccgtgtcacgtacgctttgcagccgtcggtggaaaactctccaaggaagaatggcgtcgtcagaaggatctggacgccgcacgtaaggcaggtaccgcacctgcagaagttgacgaggatggcaaagccatcaaccctcacattccaggtgagtgctttcactctagtaccctagtcccttgtaccttagatagtttcgcatcgcccatcatttgcataccaatgcttatacctcttttggttgctgtgtttccgacgtttctcagagtacatcgtcaaggctccttggtacgctgatactggccatgcttcgctgaagcatcagaagaactgggcggctgtggacgattcgaagatcgccaaaattggagaatggtacgatcgaggggccaaggcaggacccgctgccaaaaagtacaggaagggagcttgtgagaattgtggagcgatcacgcactcgaagaaggattgtctcgaacggccgcggaagaagggagccaagttcaccaacagcaacattgcggcggacgaggtcattcagagcgtcaagggcgggtacgatgcgaagcgggatcgatacaacggatacgaccctgcctcccatgccgaggtttacaaggagtacacggcgatggaggaggagcgcaaaaagttgcgagaggaagaagtcgacaagcagacttctaccgaactcgcagccgtagcgaagaagggcaagaccgaggacgacgatgcctttggttcgtcggacgaagacgagcatgacgatgacaagtatgcggatgagggagacgctgttggtcagaagctcgataccaagaaccgagtctcggtgcgaaacctgcgtattcgagaagataccgccaagtatctgttgaacttggacaccgagtcggcatactacgatcccaagactcgatcgatgcgagacgctccggtcaaaggcaaccctgaggaggtacgtccgcttactgcaccacttcgtatctcgctgctcgaagctcaccacggcgttcgctctgctcagatgacattcgctggagacaacttccaacgatactcgggagatgcggctcgtatccaaaagttgcagctgttcgcgtggcagtctgctgctcgagggaacgatgtgcacatgaatgcgaaccctacgcagggagagttactgcataaggacttccaggagaagaaggaacagttgcgcgacaccaacaagattagtatcttggcaaagtatggaggtgcacagcatttggaaaaggtgccaaaggagcttttgacgggacagaccgagaactgtaagtatgctttgctccctgttggatggcgcaagttttaacgccttctcacttgctacagacgtcgagtattctcgaactggtaccgtcatcaagggtcaggagcgtgcaaaggccaagtcgaagtacgacgaagacggtgagtactctcattcgggctcagacacttcgaccagagttgctgacgaaagtgccttgcagtcctgatcaacaatcacactacggtatggggatcctggtacgacttggcatcgggcatctggggtttcgcgtgctgtcacctcaccagtaagcatgctaagcttgaacgtaaccgttcactgcgtgaaattgacaaaacgacccttcctgtgaatagtcccaggaagctattgcacgggcaaggcgggaattgtcgcgaacgaggagaatacgattcacaagatgctggaggctgccggtgctcgagaagaacagcgaaaggccgattacgagaggtcgcagcaaaagtccttggcggagcagcacttggaaaacgttgctgctggcaaggggaaaggagctgcagattccgagaacaagcagaatttctccaaaggacgtctaggcgagggcgatgagatcgctctggacaaggaccgactgaaggcagctatcgccgcagagaagaagagaaagggcgtaaccgacgaggatgaagcgtggaatcaagcaaagcggtccaaaaccgacgtcaccgaggaggatatgggtgagttcgccatgacactactctcggtcaatatttggtttctgacgtcattttctcccacgtttcagaggcataccgactcacacgaacggcagcattcgacgatcctatggccaactacaaagacaacgaattataggtcggattgtgctcgcttggttcatgcaatatctcgttctctcggcatcttttgtagcaatatcgaaccgttgtatatcgctcaagcacctatcaacgtgctcaataaatcaatcgtgtcttgtccctcatcgtcgtcctcacgatgtcagcgatgctcttcaatttggagaccagccgccaaaccgaactgggctatacttgaggattgtcgatattaacggtacacttctgccgatcaacagtctgccaatattcatttgcccttaggcgttcgaaaggatttgatctgggttcgccatataacatgacatctacatacaaaaaattcgatcgacccgagttacacatcagaaaccacaaatcatttaacataacgactccaaatcaccctctgaaaagcaggaagcaaaacgcagacaacatcgtccagctccgcagcatctgtgatttctgccatggcatacatcccagaagaggtatagtctccctgatgtaaagacatcgcatagcatggatcatgtcgaaaccgcaatgatgttgcaaggcatggcttcgataacgaacgcctggttcttgcacatggttagtacttttgtttaagtggatcgagtcaaatccgaccaagaagcagaataggctttaagtcaggccgagtttacaacgagcctgccgagactctcgtactgtcacatactggccccctcccctgtgaatagcagccacccagtcgtcgaggattcccctcgatcagatatagcttcttgcattaaaccatgggtgctttgacaacgataacgataacgatacgtcattgaatacaggggcactgcgtaccaaatgcactaatgtgtacaaagtgtgcggagacgtgtatatatgttgtgcgtaacacattgtcggcagagccggcggaatgttctctgagagctacatcgtcttgatggaagggaagcatctgtcttcgtgaagatcgtggaagacgtaaggtaaagtcgtaatgatcgtgcgttgcggttggcggagtcgacggtgaattgccttcatggtggtatccgaccattgtcggcgaaagagcgtctagtcgacaacgattgcatcgtctgttgatcctccaggaccgtcgtccaatctggccctgacccttctcgaactcgagccggccccggtatcgtccccttcatccgtgatgtcgactacatccgctgccgtcctcctcgttcctgctcgcgagaccggttccgtgatcgaagatttgatctcctcatccaaacccaggggagaagcttcattcctggatcttgcgggaggcgccagcgaggccgaggcgacggcgtccgaattgacagaagtcgaagatgctgctctggccgtccccgcgatgggacgtccaatcgcagtggtaggtcgtggtccagcaggggaatgcgtgcgaggggtagacgacgaaggtccgggggtcgaaggcttcgagttgttctctttgagcttgccactggtaagaagggattgtttgtagttttcgcgtttttgaagattggttggactggcggcgtgactgattggatgggattcagtcagattgagcgatcgggacgagccggtgtcatggaatccaacggcttactggttggtatggtcctgggcgacccgatcgtgttcagccttgttcttcctgagctgagctgcaatgtttccgacaagcgggtcgttcgggttgggttcacacaggagtgccgaaatcgacagcatgactttgtagagcgaaagagctggagaccagttgtttttcaggatctgcgaaacgattcagctgtttgcccctttgttttgtttgtggggttgtagtctgcttacatccaaacctgcaggaaacgttcgagggatcgccaacagtcagcaaaagattctggggacaatggttgcgattcatgaagcttacagatggagccggtggagttgacattgcagtgatagataggggtctcgaagcccacacgaggcggagagaagctaattcaaatcaagcggaatgatgccgtaagctcgtgtataccagcaagagccttgtcaatcagatcctggtaagacacgcacgggtagtcggcaggaagctcgaccttgagctcgaattgcccgcctttgtaaggaccatcatctggtccgggtatccaacctgtccatcgatgaatgttgtcttcctgaggatacagcaagatgtcgcccacgtcttctttctggaggtccgcaatttccttgttgattcgcttgagcgttgtctgtatgtttgatgggatatcgacgagaggccgaggtcgccgaggtgaaagacgctgagcgtcgtggaggcaaagtatgatagactgattgagacgaactgaccttggaggtaaccggcatgacgtcggcgttcccgtggttccgtggagagctgatttgatgaaaagcttaggctgcttctacgctctatcttaggtagtagtggataatgtcgctggctgtcgaggagcgatcaaactgattgaattacgagtacgacatgacgatatgtcagtcgagttgctcaatcacctcgagttgattatcaagcgcgaattgcgcttttatatgtcaaaagatacactcgaaccgtataagacgtcatcatcaactcaactcgagcttatacatctgtactcatctgcatctccaggccattcctgccaacatacgctgggctgatcgtgccggaagctgtgcgatggtacccgcctcgtcaaacccttcgaaactgggccagcatctctcccagttcgtctacgagcctgggttgcgttcgtctcgacagccgagtgcaacaggaagtgcgcagagcacccctgagaagcctggcggaggatccgtctcgtcggcgaacaggcaagcttcaaaggcaacaccccctgcaaccggattcaagcggacctcgctccaaatctcacctcatcccgatgccggctccacgatagatgatggtcctggcaattcgacgctcgagtcgatcgagtcttcggacttgtccgaaattgaggagcatgcctcgaaacgacgtcggctggagccgaggaaagagaaaccaaagaaggcgcccagaggatacgctcctccggagacgtacgctcacttgaacatgttacctgatcagctgagggagggtctggatggtgagatgacagctcatggaatggaactcgacgcaacaggctgacgctgtcaacgactctcgcgacactcagtgatattttccggtatcaagtgggtatcgtgtctggcctcgacaccatcaccctcttgagctaaaagaatcatcgctccatgtcccgtagtccaggaaagatgtcggctactcttggccatcatttcgcccatccgacgaacaagttctggccgtaagcacgggtcggagtcgtgaccgtatacggacattcatccagaaggtccactttctcgtagagctttatataagggaggtgaatactcgtaatattcagagcaaagcttgatcccgcagctcattgacttcttttacaggtttcacggacaggtctttcacggctgccgatgatcacctcatgccggatctgttcaatttcggtctggtgaggagactctcgaacaggttcgggcaaacaagacgtcagaccgctgaggttccatgaattcagacgaatctcgtcccccgtcctacctctgaggtgagccgcgagacgccgacgcatccggcttgaagggttgtcgaatgctgaccgaacctcaggcggcagaattatcgacccacgagatgcgaatagccgttccatcactgctggagaagctcaagaggtaccgcccaggtctggtctgttttgtcggaaaaggcatatgggacaagttcgaagacattgtcgccaaagccagcactgagcctgaaaagccttggaagccgttcgagctccgtctaccagaagaggctgcagctgaagacgccaagtcagtcggcatcaaactggaaaccgacctctcgaccacggctatcgagagggaagttgacatcccattggaagtcgatgtcaagcccaatttgatggccaaaacgactgcacaaaaacgcaaagcaaagccggcctttgactggactcagccacggcagttcaagttggtccatcctgccaaagatgatcgaaccgagtcggcgaccttgttttgggtggtgccgagcacgagcggtcttgaacggactcctgtgagtagattgacgtatgatgacacgcgcatgcgctgagtccggcatggcgttctacagcgagcagacttgtggcgttactttggcttggctcgagccatgtcacaaggcattcaagagggcacgatcgacatggctatgtttcgccagatcgagatggaacgggtatacgaggaagtggagaagatcaagcgcaaggccgaagacaagtctaggaagagcttatgaatcggcattcgaaccgcatctttgactgcagaattgctcggtgacgctcgctgcgtcgtttatcgacctgtacataatatacatcgtagaatctcttgccgcattgagacagggaacgtcaaggttgggatacaaatacactacgccgttcgaccatgcgcatggcgctgatcaatcattcctacgcctggctctgacgacccacaatgggtccgagcggctctcccgcgaaacgacttcgatcgactcgatctggtcgtacagcttgcccggtgaaacgccggggtagcccgagtcgtccggccgagccggttgtttcatgactgtcgtccttggcaagggaggcgacggagtgtatgccgtacccgcaaagtgaaagtacgaggcgacgaggtcgagacgttccggttcagagaggttcagccaggggcggacgacctggagcgggcgaagcggtggaggagccatcagtgcccgccgatcagatggctaatgactaacgctcgaagacgactgacctttgtcgggaaacatcgattcgagatggccaggtatacccatccacccggcttgatgacattggccgtgtgatacaagacatccaggggtctcgtcaagtaatcgatcgagacgttgcagacgaccgcatcgaaaggcgggtccggggtcgcgtcttcctgaccgaccgtctggacgaccgcttcgtacgcttcccccttctccgcctctctcaatgcgtccttgacgtccggctgtgcgtccaggtccaataccttgtaatgactcagtatcggattcgccttcaactctttggcgttgagaccgactccgacgacccggttccttggaaagacgttgccgctcttgagggggatatgactgacccagctgctcgccaagtcgaggatcttgggcaggtccctcgtcttgccctcgacgatgacgggcccgggcaagacgtcgccgtaaaacttgttcagctcggccacggcgttttcgtcgatatgatggaccatccggctgtacacgtagaattcggtcgcgggcgcattgtcatggggtgcgagatcgtgaagcgagtaaggaaatcgtttgggaaacgaagccggggcgtaggcgttgactcgatacgagctcgggattgacattttcattcgagcttacgggcagggcgggtcggtcagctataaatctgcgatcggtgcggccgaaaagagacctagcctagactatattcggatgatcgaaaagaggtcgctagcctagctggtagctggtagagaaggtccccacctgcaacctgttgtacgatcgcgatcggggaacgtccctcgacctccactttccccggaatcaattgaccggtcggaggcaaatcccactcggcgacgatacgcacgaccccgttttggcgcacattctattgcatagagagagagagagataccgaaaacaagaaaccgacacgaccatgacttctccccccaaccctgaccctgaccctgaccctgctgcgctacgcccgcctacaacataaaggtcaacgggttctccatgtaacccttgaacgcctttagccacctggcggcgatggcgccatcgacggtcctgtggtcggccgagagggtggcgttcatcatctgggcgactttgaaacccttttcgctggaagcgtcgggcaacaatcggtccaccgtaccaccgatggcgaggatgcacgactggggcgggttgatgatggcggtaaactcttggacgccaaacatgcccaagttggagatggtgaacgaaccgccctggtactcttcgggcttgagcttgccgtccttggccttggcggcgagcgccttgacctcggacgagatgctggtgagacccttgccgccgacgtccttgacgatgggggtgatcagaccggtaggggtggcgacggcgacacagatgtcggccttcttgaacctgtgcgcggagaagggggggcgagggacgaggtcggaaacgtcggtcagtctatcgaatccaggtcgacgacggagacgagtcccggggggagggcacgtgttactcactgcctgatgctgtctcccatccaagcagtgttggcctcgggcacatcagcgagagccagagcagaggccttgacgactacgagcgcgagcgcgagacctcggatcagctctttgaaacctcgccttctaggatgtgagcatgccggccactcactaaagtcgttgaccgagagcttggtcttgccctcggaagccttgttgaacatttccctcagcttcatcacccggtctgatcaacgaggttgcaatgtatcagctaacccgtcctcttattcgtacgacccccgacttttacgctctcatcgacccccttccgggcgattcgactcacccatgttgacctcgacggtgacgtaataatgaggcacctgggtcttgctctccaacaacctctgtccgatgatcttcctcatgctgctcgcgggaacgtcttcgtactctgccgatgacgacgcagggggagccgaggtggatttcgaagaagaggagctggaagatgatgacgaggcggcgggggcgggggaagaggtgggcttgtaagactcgacgtccgactatccacatgaatgcgatcgagagaatcagcgagggccccggttcagagactttcgacccgggactgaccttggtgatcctgccttcaggtccggttcccttgacctgggccaatgggattcccttttccagggcaatcttccttgccaacgggctcgcaaacacctttttcctatccccacccgcttgactttccttgggactcttcatctcttcgaccttgccgccgctcccgtatttacgttcgtccgccggggtgcccagggcaggggtgacgtccttctttgccgactcgctcgaggtggtctggacggattcgtgagaaccttgaacttcctcctgtttagccccctcggacttgtctccctggggttgagacgccgcgggtcccgacgaagacgaggattccgacgaggaaccgccttcctgggccatggcgtcggcgccagagaggtcgtcaccctcctcggcggtgatggcgatcagggttcctaccttgacacccttggttccgtctccgacctgtcaaaacaggggagtgccgacaggaaacaaaagagcgaggaggaagagacaggatacatcgttttttccggtcaacgagatgaatcaggacgtcgactttcgtctcgtctcgtcggggactcacgatgatcttggccatgatgccgtcatcctgagcttcgacgtccatggtcgccttgtcagtctcgatctcgaggatgatatctcctgcggcgaacgtgtctccctctttcatcttccaggtagagatcccaccctcggtcatggtaggcgacatggcgggcatttggaatttggtcaacgccaggggcatgggggaagggtgaaaggctgtcggaggcggggtggggcgtgggttatggcaaggcgatgttgaaagtgagagggtattgtgtgagcagggcaacgtcgtggggacgaccgagatggtatcgctcgctggaatgatgcgatggaacttacccctctttgcagaggcctgggcgaccacccgttgagccctggaagcggcacgaagagcgaacattgcgtggctttgttttgtagagtggtgggcgagagtcgggagagttgagagagattggtgtgagttgacgggggactcggtgatgaatgtggatgttggtcgaggtggtggtgtgtgtatgtgtgtgtgtatgtgatgtatgttgttggtcgatggtcacaacgtcgatgtcgatgggggggaaagtctccaaatgatccgtttcgcgcgcgcggcacaaaagtaaagaccaaggcggcggcaacggcagcggaaaggcaaaggcgagggcaagggcaaggttgggcagagttgtcaatccgcggatcgtaaactaaatcatagtcattcgatcaaccatcccccccgaggcaactcccaaccctgacctccactttcacagagcttgggatcttgagaatcattatctacatcatacatcatgcgatcatattacgcatcaccgaccagcgtctcatatttcccgacctgtagacagtctatagtcaccgtccccgcctcgctaccatgtccacaacagacatcctccttcccggtcaacccttgcccgcaaaattcaactcgtcacccacccctcaaccaggtcaagggtgttacctcgcccatggaaagctcatcgccagtatcgtaggagtacccatcagggacggttccctaggtacgctatacacacacccgcgattatcctgccgatatgggcgacactgttctcgtatcacccctcttttgaccgacgttcgacgtgagaactgatcccttgctcgtccccgaaatctgctcgaaaacgaaaacgacgatcgcgcttgccttcaaggtagtcagcgtgaagagtaggcaagagacgagtgccgtacccgaaatcggagcgatcgtgagtcccggcgcgctcccccctgtcttttcaacctgtcagaccggatccgtacgctaaaagacactcggttcggttcctcttgctgctggtacaggtcgtcggcccctcatccccctcctacctagcccttccaagacgctagagacccctctggctgattccccggtgcctatgaacggatggacggccgggtcgacttcctccgcccccagcctcgcgcgtttggtctggagcgcacgggcgtagatttccctgatgaccttcagcgagtctagctcggttaggagggtcgtcctatgagggccgttgggataaagagcgctcggtaagggagatggagggtggacgttcaggaggaaagaaggggaggagagtgagaagagatggccccccggttggagcacgcggtggacctcgttcatcaggtgtgtcatcgagatcacctgcagagatcaatcgcaatcgacgatcatccgtcccctcgtcaactcgcccggtctcgcgatcgcggccaccaacgagactcaccccggaatggacgaacctcatgtgtacgacatcaaacgtcttgtcagggaagggtaacccatcgttgatatcgtacacctcgaaacggcagttgagaggcacggagcggggttggataggcacgaggtcgagcccgatgatctcggtgctatcaacacggagaagggagggatcagtgcgtatgtcccatcccatcaattgcaagggcgaggagggaggggaggagggactcgcttggggaattcgtcggcgatctggatggcccatctacaatcgcaaaaagtcgactctcggcataatttcagacaaagtccgacagagttcaatgaggagggactcacattccggtgccctatgacgaccattcaacgataatctaatcagccattccgaccggcacgacacgaaccaagtccgtcattgctcgactgacggtgccgatatccagtactcgtttggggcgaccgtgattcgggagatgtccaccgagtgcctgaaagaatggtccaaagtaatttccaccgagagctgggggctcagaaaggaaactcaatcagagacgaacgagcaagattgcggtcgctaacgtcagacctagaccaacccagtctgaccatgttatgctgccaacaatgagccagatcgttcagtagagaaaagtgcaactacggggtaaccttggcgaacctacctgtgcgttcagtcgctaacgttgacgtcactcgcctcacgtcagcttttccccttccattcaacccagacgctttgacactcgacccacttcctgttcgatccgatcggaaggcattccatagggactcgcgctcctcgccatgatcctacctccgactttggatgcccggaaatattccccttgatgcagctctggatcataagggatcaacccggacgtgcgggtgggacgtcggatcttgtcgcgcagggctttgagctggtgcttgtaaccgggttcgtgcaaactggtaggtgtgtatgtgtaggaggaggcccatggagaagatgccgtactgcaatgacgagatgagacgggttggtgacatgatcgtggctgttagattgaactcgcctgttccagcctggtacgacggactgatggtaaggagtaccggcggttgccatagcatggaacccgtcgagatggtatggcaccctgcgcgtcggtccaaacgctggactgggagtgcttcgaggggtcgccagttctttgagtccgaattggagtttccgaaatcagtctcgactaggctcatacttattacacgtcgtatctacccgagtgcatggatgacgtctcgctcgtcgagctgatcaattcgaaaggcatgtcgacgacctgtttcaaatccacgacctgtcgtgcgaatccagtggtggacaatattccgtctaattgccattcgatcgctcaggtcgctcgatcgtaaaccctgcgttttggcgaaatgcctgtccctttatacacactaggaaacggcaggagatttgttgacacgcagatcatagatgttcattcaaccagctcggtaaccatgcaaaccttgctcatgacactgcaaagggcagatttggtgctcgctgtcagctttcaaggtgagataggggctcattagttggtcgcatctgcaaagtttcgcccttttgatcagatcagtggcgtttgacgcgtgcttccatgacggaaagttcctttcgattccaaaacacgcgtttcagggtcgtgttcggcttcgatcggatcaaatcggtccgggagtttcttgtacattgaacaggctgataacacgagccctaggcgaatgttgtactcgggacgattaaaattcaactgatcgtgagacgaaatcgaatgtggacgtcggtagtagcccaaactacgtatgcatatcgctacgaccatgttcgcgacgggcgaggtcatgacgagtctgctccacgtcatgtacaaattgatcattcacatttccgtttctcgatccgctgattgtcggagagggtaaggcgcatatcatgttgtaacggcaagtggctgtggggcgctatcattgctggagcgagatcaaagtcgggttcgacctgaccccggcgaacggttccgttcaaggccgagccgtcccagctggctgagtctgtaaccagagtccagctgccgcggcgttcaaaaacaagctggagcgtcgctcagacctctctgaaacggcgagcgaatgtgcagtcgatgatctagacgcgtggtgggtgatatcagcaccggttttcgaaagctctgacgctcgcgcctctcagcaagtcgccactcacctggtcatcttgcccgccttggaagggctgggcatggacaagaactcttgtcctgtccctggtccggacgtaccctgttcgggcttgccgatatgtcccaccacggccggctgaggcatactgacactctcctcggccattgacgcgccagagaaaacctccaaacagttgagggggacgacgccccgttcgaccatgccgtcgtgtccgaacttttcacaaagagaccatccgtcgtcataggcctggacgagaatgagcttctcgccgacggtaatcacgagctcgtcatcgaggcttcgaatgaaaccttgcttgacgacaacttgggaaccatcatgaaggccagtggaacgagcagcggcgagcgggtcgtcacgaggcgtgcctactgccatacccatcacgggcgcactggggtcgaccccgtcgttgcttgcaaacgaaccaaacgtgtgaggagttcctggcatccatcctgattgaggctggggcattcccatgctgacaggttggggtgggaggggcaagttcttgttgatctcgtggtgagcggcagcttgctgataaggctgctgggcgtgataggcatcgtaggtctgttgcggcgcgtactgggactgaggagggtaacccgcatggtaaggagagttgacgggctgttcatagccttgatcatatcccaaaggatgcgaggcgccggcattggtagggaactgacaaggacgtttcgcttgtcagctcttcgtgccctgtaatttcattccggcgaaatactcacaggtgaaaccctctccttctccccgccatcccacctgcccaccccgtcctcctcttgcttcccgtatcggtcctccgccgaatcccaacctcctgcaccactctgtctctgccctgcccaagcactgagtccagagattcgacgagagttgttacgggaacgacgcttgtagtacctgtatccaaccagggcgagcgcgaggaccgccaagagggaggcgatgacaatagcggcgatctgcacattgacgtgtcacgaatcagcctaccgtctcacctcctgaatggcctgatatcacttacgattccgctgctcatcttgaacccttcatcagcggcagacgctgcactcgcagtagaaccagcgggagggatcccagcgctgttcgctgccgagctggacctgatggacgataccgaggtcgagcttgacgaaggggtgacgatcgaagtcgaggtggtcaccgaaactcgctggctggtagtcgtagcgatggtggaagatgcgcggggggttgtgattgaggtagaagatgtcgatcggacggccgtactgctgacaacagaacctagagcgggacagtttaggcgacgctactggggaaacgcgttgaaaggcttgccactcactagtagtccgtagggttgtcgcctggacaggtccgatcgagctgctcctcgcagcagaggtcacgacgaccgaggaagtcgtcctcaccgccgcagcggtcgtcgttgaaggcctgaccgccgtcgttcggctggtaacgagggccgcagtggtcctcaccaaggaagcagaggtagaggtccggtctgagccgagaccggccagggacaagagcgattcgacagcatcggccatgattcttgatctcgagtcaaggtgtgattaggtgaaaagtccgtcgagcgaggtgcaagggtaagaggtccttttgtcccggtctagtctggctagggtctaggttgtccggatactacggatggaacgattcgattcggttcggagccggatacgaagaagccttgatgagcgtaaaaggtccgagacgagcgagaacgagaggtcggagtttgaacgtcgaacgaagagctggagctggtccttgcttccgtatgtgatgatgtagattcgtttactttgcgtctagagagccttggagcgagtttgaattggctggcaaggtttctgctactttaggcgatcgtgtaccgtcggcgaagctgatcgtcgaacgtatcgtgaaatggagtaatgtagatcgataccggatcgtcgagattctgttgatagcctggtcccgtggcgtggaagagagacgagacgcaggtcaaaacccctgaaagcgcccgtctgcagttcgttcgagaaaggcagaggtaagtggagaaaggagctttcgaggtcgtcgaaagggtagctgatcaaaggttgcgtgacgcgtttccgataaagaggtcgttgaaaaagggcgggaagcgaaaaggggtcgggggtcgttctgaatcgaaagtgaggctcagcctgtgtcctagcgagtgtggtgtgtgtatgcgttctataacgagtgtggttgaatttgctgcgccttgtatcgctcgcttgactatgaatgatgatgactttgaaagtcgttgattgtctggtcgttgattgtctggtcgttgatgccagttcaaacacggggcataatctcactagggggagttgttgttttgattcgaatatgttccggcaacaaaattggcgctaattttaggatccggagaatgtcgcgttctcggttagcgcgattgtgacggagaacaggagagagacgcgtcttcacacgtttcattcgcaaaacgagagccaaacaccgatcgacggatatcgcctacgtcgagcctgcggccaacgagtcaaaccaaacagactgtaccaaggtgttcaatgacatgagtcagcaggaccagattcggatgacctcccattcgcacatcacttgaccttgcgaccgtttctctcgccgcaaaaatgctgtgttttctaccacggagccgatctattttcgagaccgaacggagccggacggcgtctcaatgccattcggcccatagaagataagcaacgactatcgttgcacgtttcttctcgtcacagacagtctcctgcttttggcgatgccggttcctggtcgtttgggcgaggtaggtatgccggcctcgcgaccgatcatctagatgccaaaaggcaaactttgggaaagcgcaacggcagagaattgacagtgaggttcctcggtttctgctttacacaactgcaacacctctccggataacatgtgctcaggcattcgatgcgtctcgagtagactggtgtttcccggtcgaatacttcttacagtctcactcacacgggccgattggcgtgacgatgtcgaaggaacctgtcaaccgttaacatgttgaaaaaacatcattcgtcttctaggccaggattggcaggagacatcactgcgttcgagtcgaatagcggagactggatgagaggcctcacacgcggggcggaggttttacggcaatgcctggacccgaagttgcgggattgcctatggaaagaggactccaatagattgttgggaaggaaggctcaaactcgatcggagagaacgaaataagcatgcgatgtcaagtagtcgcatgagatgcgagaacacgcgaggattcgacagccacacggctggcttcctgtgtcatgctgggcagctgccagggtgccagggtgagctggcacacagggatcagccttttcagacaggcgtcccccagggtctttgaagcgaatgattccgatccattgcagctacacgaaggggattgaaattgtaggggtgaattcaattctgtggtcttcctgatttccccttgtatcggtcaagatacacttcatccacacataccctatcgtcacagcacgtactgttatagatatttcacgcgtgtctgggatgtctctcaagtgtaggatctcattgttgtctcccaccgagtcgatcgccgggatagctcaaggtgtcattaggtggcctcgaaagtacttccatgccacgagcatcatagatgtgctatgggtatcgaggttagagattcggtcgaggaggaaagatggagcgaccgttcagccatgcaagcctccgcgcgcacccagaagattggaatgagcgcccgcgaagcgggcgcgaaattgtaaaaaataaataggtaggtccgaagacccatttctgtcatcaagcgtgtcatccttatgcaggggccatgctaatcttctctgtatcgttccaattttatcgtagtgcacaccgaagtggcagaatgtaaggcttttggtccggtttgtcgacaacaagttgagtagccacctttttacgcgtgactcgggacctcgcgcgctgcgcgtcgccctgtccgggcgacagaccatgcagctcactgaccgtgagtccccgctcacttcgttcacgggtcctggacgcatggcccctgcataaggatgacacgcttgatgacagaaatgggtcttcggacctacctatttattttttacaatttcacgcaaacacaacagagattgatcctcggatcaaaatatttatttttttgtgaagagatatctctgtatcctcgattgaaatgtccagacaggttgaattcttttttttttctttctcgcgcaaaggtcttgtgcgttcggccgatagtatacacgtaaaccggaacttgttacggaagtaaattacatggtgaccgagagccgagtacagaacccccaccaacctccaccacctgggccttcccccaaatgtctcgatgacggacccttggtcgtccgcccgaacctgattggtcaggcagcacaataggcatggtggggatagcgagaacacacccagtcgagacacctattaggtagatatgcaaaactcggccaggtcgcgcgtgacacgtcatcacctcgggggcggcgacaccgtgtacccatggtctttgtcggtctgctagatttttgcacaggtgtgttcgtgctccgcatcggtgcacagcactggaacgatcgggatcactgtgggacgagcagatcaatctcagacccaatctcacctatgggttgtgggcgcaaatagtccctcagtccatgcgagattctgaaactgatgcgagttccaacgatggtagatggtagtgcgatagattccactggccaaagtatacatgccgtaatcacttcaagatgctgtcgcctgcttgtcctggtaaaacgtccccacgtgagcacttccaacgacgggccattgacggggaatgctgcgagatgagcccgaaatagcatcccggcgacaaatcacgtccgagcgtctggcgtttggatcgtttcgggccaaacaaggttgttgcctggtagctagtagctcgctcaccctgaaacgcgccaagcatcctttggcctcggattcgcttgtcgagcgccggatgaagccgtcgggatctaccggagatggaagatgtcgatgtccgaaacccaaaacgtctcggggttttgggtattgtctgccacacagcaaccggattgaaacccggccatatgtatggccgaagtggattctagcacagctttgggcgactcgatcgatgatcggtggaatgtggggctgattggacttggcggtgattgcaagatgcatgcaagatgggatgcttgtagggagatgtactgctggtcatacacgaggtcgagcgctgtggcttccccttcgaatggcgcttgcaacgctcggcctatggcgtctccatcgaatggcggttgcaacgctcggccgattgggttgagagggaggagcgcattgaacggcgcgacgccgacatccagttcgcacgatcgtgcatgctgagcaacaacggggttcaatgtccatttccgtgcgtagcagtggtcgacggacgatacgacgttgccggtcggccccacgccgggtggagggacgagactccctaggtaatacgggttctgtgggatacctcgaaccttgtagacgtggaccccgacctcgttccaggtggatagattctggaattcgcccatgacatgaggttcagatacgcgggtccggagtggatcgagcacgtcgagcttacctgctgcagccggctcgctacgaaagcatatgcttcgttgatggatctggaccacagccttatctttggttggctgaaccaatgctgaaacttgacactcttttcggggtcccgagacggtactctgcccagtatgaccttgccggcgatccttccatcgtgacagcagtcgagaaagattgggttggctcgagacgaattggatgtcttttctcccaggaaatgcagagcgccacagtgagcgcacgcgaactccatctttcccgcgcttattgtgacatctccttgcaccagctcgcccaggggtttgtccacctgctgggcttcgtgctcccgtcttcttcgctgagcctcgctagctcgggatggtccggcgatcgggggtggcacaataaaagctctccggggggcatctcgcaaggcgatctgacgagccattggcatgtttaatggttggtcggggagggaaaggcgataccgaccgattgctggctgctgagctgtggaagtgacggccaatagcctctcgtgcggttgagatatagtctacccgattgctcaagcatgcccgtcatcaatcaccgactcgatcgactgccagtcggtcgtcatgattccgccgtgatcccgggcatgttcggagatctggactatcactatcgccgttgtctcacacgccacactcggtcgtccacggcatccaaactcaatcatgatcagccatgaaacgcgccgatccgcgcgctaccacgagtgaggacgagaggaccgcttgttgcacgttgcatgttgatgatgggtgttgaatacgatgagacaaacagacgatgaggggtgatcaaccctctatttctaacatcctttggatcggagggatggtgtgcccgctgatccgctgttgtgtgattttccggacaaggcgatagatttcaggccgagattcgggctcgaaagccgatccggacttcgatttttgcccgccttgtcggatagcagaatcatatataaccctttacttacggtgatggtctggaagtcattgaaattgagcctctgtcaactgcaatcagcacgtcagcacatcatgtcgaccgatccaaacgaagataaagcgatgcaatacgggctggctgagatcctcgaggaagctcaagccttaccacctgccacagacgcggctttggccagcaagttgctgctgatgatgatgccaaagaagtaccaccacaagaccgaattctggaccgatcccaaggtgagtttcatgattccgcgctctgtctcggcacatccggtagatcttaacgctgatgtgcgtgtacttcccaggtcttcatgaggaaattgattccaatgctgcagagattcggcattgcccttccaagtgttgtcctctccgttgctcaggtgggtccatccacttgttgtaaatgtgccgcgctgatctctgtgtgactggtatgtgataggattctcgtctcaataccttggctggggcgttcaccatcaactgggtcggggctatcgacgtcctgttgccgttgattcccaagtccagtctcgtacagggtgagtgagaacgactgtgatagtcctgaaagtgtgatgtcggacctgatgcgggtggtctgtggctgttctgtggctgtagcatcggtgaaggagacggacttcaaggggcagaggttcaaggatcaccttcgcaaccactactccgagtccgcgtacttgcccttacagtcggtctatcacggtttggcgaagcaggttctatacgaacgtctctgaaccacctctgatgcttgaggaagggccaagactcacgtctctataaaaagtattcgagcattcgctttgtatattcatatcgtataactcatgtttacgttaccacggtcgttccctgggcacaggctcacaggtctcctatatcttatgattcgtgtctgtctacctaataggtgtctgtactgtacgtgttcgaggtcccctttctccccgacctccgaggcgacactcgattcgacggatggggttttctatttacctcctccatcggaagcaaatgacccggccagctggctcgctactcgctactcgtcatcgcaatcctgatcgatatatcgatatcgctagaccccatccttgatcattatggttgatcgctaccacatatcacctgatatacccgcacttcacaaaagaatctcgtatcgcaaatatggacgaagaatacgatgtgcgtcactcaccgccggacctggagcgagcagaacgattcgctcactttctgattctaattgatggcggtcttaggttatcgtcttggtatgcaaggctgcaggtatgaatgcctacgcactgctgaccaaattaatcgctgtctttattgcatctttatgttgggattgccgatcctttgcactcgctttgtccacttgctggtcgggtcacccatatggaatgcttgttccatcatcattcacaatcgccacacatctgcctgctcgaatctgatacggccgtggaataccctgggaatggatttcgctcgggcatgatatcatcaccgcacaaatacctgaatccgccttggccaacctattcgatcactggtgacaccttggcaatttgcctttcacccgtggccttccgatactgtacgctcgtgccgggtcatcttcgctcgcttcgctcgctgcggtgcggatatttccgcgggacctctcgaatcatcaactttcatgaaatcgctcaacggtcgacatcgcattcgccgcacaacagggcacggggctcaccgagtgtgtccttagtggactgctcagcaagagcggcaagaaggtccttcacatggaccgagaggattactacggtggtgcttctgccagtctgaacttgacccaggtcagtgcatgtcggtctccttccctccggacctgaggtcatgtttcctcgtccgactcgcagctctacaagaaattccgggacgctcccgccccggacaacctcggccgtgaccgcgactacgccgtcgacctgatccccaagttcatcctggccagtggaacctttacccgtatgctcgtccacaccgacgtcgtccgctacctcgagttcaagcagatcgcagggtcttacgtctaccgtgacggacggatcaacaaggtcccctcgaacgagagcgaggcgctgaggagtagcttgatgggtttgttcgagaagcgtcgagctaggtcgttcttcatgtttttgcaaaactggaaggacaacgatccgaccactcatcagggtgggcattgacgtgcgcaccgtgaaaccaaagtcgagctgacgccgattgaccccttgcaggcctgaacctcgacaagaacacaatgaaagacgtctacaccaagtttggtctcgaggctggtacccaagactttgtcggtcacgccatggccctctacttggacgacaggtacgggtcagcgtgcaatgcctagcatcatgactcgagctgacctcgctcgcagctacttgcaacgccccgcccgtgaggcctacgagcgaattctcctctacacctcgtcgatggccagatacggcaagtcgccctacatctactgcagctacggtctcggcgagttacctcaagcctttgcccgtctctcggccatttacggaggtacctacatgctcgccaagccgatcgaaaagatcgtcactggcaacgatggcaagtttgtcggcgtgaccagtgagggtgagacggtcaaggccaagatggtcatcggagatccttcctactttggtgcgggcaacccggaaggacaggacggcaagatgcgtgtcgtagaggagaagaaggtcgtccgagcgatctgtatcctcaagcaccccgtgcccggcaccgatgacgccgactcgacccagatcatcattccccagaaccaggtcggacgcaagaacggcaagtctccgaaaggcctcttgatcgagccggtagttccgtgctgacgtggaccacatcctgctcgagatagacatttacatcgcttgcatttcgtcggcgcaaaacgtctgcccgagcaacctctatattgccatcgtctcgaccatcgtcgagacctcggtccccgagcgtgaactcttgcctggtctccagctcctcggaaccgtccaggaaaagtcggtcgtcgcctatgaccccccgctccgtcgatcacgcgctgactcgccgtgcctttgccgcataggttcgtctcgatcgaccccttgtacactcccacggcggatggcaagcaggacaacattttcatcaccaagagctacgacgctaccacccacttcgagaccgtcgccgaggacgttgcggacgtctgggagcgaatcaccgtgagtcctctccgggaagcggcgcgcgtgcggagccagagccgggctaaaatgctgcgatacggcgtttttttcccggcgacctttacagggcgagaagctctccctggagaagagcgacgtcgagatccaaggataagcggttcgttctttacgcaagccgagcaagtgtctctatctacatgtataccgtccgtgtgttgctgctatccatccgtcgaacgatgtccctgagctgtcggcgtgggaatcacgagtcgaagcggggtgggccggcgttgtggttacgtgcgtcatcaccgagttgtgcggaatcgtctccgaactttggtctcgatccttgctgacctggccagatcccccctgtgtcgtcgagatcattacatgtcatcaaatcctaccgtctcaaccctgtcattaataaattctgtgcagctatagaccatctatctccctccgctctcgtcaaacaaaagccatcaatacaccacacacacggaaccatgtcctctgcattgaaattcctcgtcggtggctacggcaagaccatcaccctcttctcctttgacgctgcgtcgaaatcgctcaacgtcgtcaagtccaactctggcttcgtcgcccctacctgggtcgaggctagcgtgtcgtccaccctccgaggcaaggtcttttacgccgtcagcgaggagaatgggcaggttcagagcctcgagctcaaggaggatgggtcgctcaccgtcactggttccgcacctaccaacggtaaccccgctcacagtatgtcgtttcgtcggacgataagatgcgacttgtgaactaagcaagttgcgatcactttgcagttcacgccttgaaggatggatccggcgtagtcgctaccaacgcaagtcttcgatcgacctggatgaatgcatcacgcccgctgacgtttgcgcgactttattcaatgcctcacagtacatgggtggctctgccgtctttatccccgtcgacggcgcgaccggagccatcgctgccgcaccttcgactgcccagtccttgttgtccaacgtgaccaccaaggtcggctcggtttcgcccgtattcgagttccagccattcagcccgtacggcaagtcgagcggtcctaacaaggagcgacaggaggctagtcacccgcatcagtgtatcgagggtcaggtgagtaccgaagtggatcggcggcgatgcggaagggtgacatctctgacgtcgattcatgtctggtgaccgacagaacggcgacctctacgtctgtgacctcggttccgaccgcatctggcagctggagcgcaagggagagaacgagctcaagctcgtaggtcaggctgacgccgtctccggtgtcggtcctcgacacgccgctttgcactcgaacggcaagtctggccctttctcgtagcaaacgtaaaactcgtgctgatccgatcatcctctcaatcttgcaggaaaatacctctacctcatcaccgagctcgttcacaaggctttcatctaccccgttccctttggcaaggtccctgccacccccctgcataccgagggtgccctgaccgcccccgccgacgttcccaacgagctctactcggagatgacctcgggcgagatcgtcctgaaccctgcccacgagcgcgtgctctacatctcgaaccgtggtcaggtcgacctcaactcgaagacgggcaagaacgtcaagggagacgccatcgccatcataaccctcaacgagcagggtgacgagtttaccaacgtcgagatcatgcccaccgagctcaactttatccgagggatgcagatctcggcggatggcaagtacctcgctgccgctggacaaaaggacggcaaggtcgccgtctaccagaccggtggtcagtatggagaaaagctcgagctcgtcgctaccctcgaggctggtctggacatgcccaccgacgtcacctgggtctgaactggtcgtcggaacttcctcgagcgcggtcacggtgtggtagaacgtgtatccaaatagaacatggagataccaaatgaaaagcagccgagtgtcatgcgacaagactgtgtgcggtgagacaagtactggcagaggagactgcttccatccttccatgtcctggcattaaattgtgcatgtgacgatgccaagctgtacatcgaccctactttaagaacttttgccctacttgtcgtcagcggactacgaatccgcccagctggccgcggcggccttttccacgtcgtcgatcgttccgaccggttcgaccggcttggacatgacctcgacctcggggttggcaggggccgtctcgtccttcttgttcgacgtagattgacgcgccgagggaaggtcgcttcgtccaccccgacgacctcgtccggcctgaccttgaccgcctctcgggctagcacctgtaccttcccgatcatctccaccccgaccgcctcgatcccgtcgatcgctccagctcgatcgatcctcatccccccgtcgagcgtatcctcccctccagacgttccccctgacctccctgtcccagatgctccccccaatcctgcccgaatgccctctgaggacgatctcgggcgcctttctaaacccgcccgaattggcgggtgcgagtccgttgacgtctccattgtaattcgaccccgccgtgttcggaccggcgtctaccacgcccgcagtggtattgagcctcctcttcttactcctcctgtcctgccctgtgaggtaactcgccggttccgccccgacgtcgtgtttctgtaccaaaggttcctccctcgtcggcaatttgaagacgcccaaaagtccatcccaagccgaggagaggacgtgcttgtaatccctactcggggtcaacgagcttataggccccgtatgtaaatgcaaggtcatgatctcctgacaaccggcggacgggtcgggcgacgaggtgttccccgcgagctggagcatgcgttcgggggtgatggagaagacgtgtgattgtcggtcgaccccgcccgcaccgacgaggatgggggaagatgggtcgtaagcctcgtgcgaggggggaggggagagccaggaagtgcagctggatcctaagcgggtaggaagagggagggtgatgctagcgggttcttgaacggggtcggaggaggtcgaggtcgaggtgggatgggtgagggggatgatcttggcgtgcgagaggtaagaggacaagaggatgaacctgtcgccgatggacgcgtcagctgaggagtccgacatgactagcctcaggcgatgaatttggggactgaccctggtcgtttgatgctaacacccgatacccaatcatcctgagggaacgtcccttgttccttggggggcaacaagctctcgacgtactcgacgtgcaaggtgctctccatgtccccaccccgcttgttcttgacgtacgcctccaagctcccacggaggagctcgccatcgacgatgaaatcgaatgggataggagccgaggggttgaggaccttgttgatcaggctggaaagttggaatcgacgccatgatgagggcaagaggtaggtcgaggaagggatggtatgggatgggttacgagtgaagaggttgatggggagttgaatgtcggtcgacgtggacgccgtggtcatggcggcggtagacgagtccatgattgagaactaggccgtagagtgactagatggcaaatgggaactggatcttgctgaagatggtgtggttcgacctgatctgacaagccagatatcatcggtcgagctagctagctagaggtaggtggttcgcaattatctttctgaacaattcgaaacttggataaacgtcgcccaaagacctccaccctggaattgatcacggcatggtaacacggcattgcgttgttattacgtagccaaagctgtgtcccatctccactgcaccgcggacactcctgaggtttgccccctttctaatcattcccccccccttgccttcccttcgccgagccttagctttgcctcgttcacagcattcatcatcatcgtcgacatcatcagatcatcatcagatcatcaatcgatagagtgtccctcttgtcgacctagtcagatatctacccacactagcccatgcacaacacgagcaacatggcagagaccgctaaacctatccaagtcaaactcgtacttctcggtaagtccctgttcaacccacaaagctcaaggaacgaggtcccctttctgcatccggctcgagagtgtagatgacctcgtcataccccattctccgccctcctacccatctcccggccaataacacctcgtcttggcctcttccttagtctccgtcttcgagtcgttgtccatctggcatacaagcaagctgacccgatcctcgttcccgccgtcacgtcaaataattctgacaccctgcaggcgaagccgccgtaggaaaatcctcggtcgtcctccggttcgtcaacgacgatttcaacgagaacaattcacctaccatcggggccgctttcttgacgcagagtgagtggggtcatgagctcgtggcgggtggtggtcgcggcggtgatgtggcgggaggaccggggagctgatttcgccgcgctcaatgacgtttgcgagggtagaatgtaggttggaggacaaggttatcaagtttgagatttggtcagtagtcttcttcccgtcttcctcgccgttgtccgcttggatcccagctccagggctaatattgcaatcgaactgttctcaactcactcttgatcaccctcgatcgtctcggaatccgaactcgcctctgtcgcttatctcacggactcggactgaaaacggatactcccgtctatcgacttacctatgatctacaaatctccatcggaaatctgtccgaatcgattcctggtgccaatcggaaccaaacatctcgatcgacgcgcaatccaattcgaacctgcctccctcctcgactggaacaccgtgatcgcgataccatagggacaccgctggtcaaggtacgttcgtcgaccatccctagcccatgatctcgccgaggcaataatgacgcacatgtgcttacctcgccatggtctttttacgcggaatatagaacgcttccactcgctcgctcctatgtactaccggaacgctgccgccgctgtcgtcgtttacgatatcaccaaggccgtgagcgcaataccttttacgactctgtttgcgggatataggctgattcgctttggtgaatctcttatagagctcgttggaaaaggccaaggcgtgggtgaacgaattgcagaggcaggccaacccgaacattgtcatcgcgctcgtgggtaacaaggtgagcatcgtcgtcagagggtctcctctcctctcgtcgaacgagtgagtcgcttcctacctgaagaaaggatcgctaaatacgttgtttccgcccggtcgtagctggatttggtcacggaggctcagaccgcacaggggagcaaggacgccgtctcgcccgtctcgccattctcatccacctctgccaccggacctaaaaagacggacggcgatgagaatgacaatgaggatgaagaagagggtcaggagttggcagacgtgacgggcggtcgggaagagacggggtcgtcgtccagcaagacggatgaacccgtcgcatcgacgacgacaaccgcacccactgctgtgactggatcggaagacgtcaatgtcaggcaggtctccagggaagaggccgaagggtatgcgaaagaggcaggcgggttgttgttcttcgaggcgagtgccaagacgggcaagggggtgcaagagatctttaccgaaatcggtacggcgtcatcgtcgcgtctctcgcatgttcccggcactgaccagtgaagtgatacactccgcagctaaaaacctaccgatggactcgatcgcaccaaagtccgctccggctgggtccaacgccggatctcgtcgagcggcgggcgcggcaggctcgaacgccaccgacgggaacagggtcaacttgggggagcaaggacagaagcgacaaggaggatgttgttaatcgccggtatcgccttgttcctccagtcgatcgtgttggaacttggtcggttcctcttcatccgggttcaagctttctggcggacgatccggatgcggaggaacgtgtacgtgtacgatcgtttagttctttcttattttttggtcgaggcgcccctcccctcagatattaccagggtgagataaccttaggtccgcccttgaccatccatccgtccgcttgttctgccgtccccggttctccattttttgtagttgtgcgtgtaccgaatatgaacacctggtctcgaatcggccgcgcagagatggatccgacgggcttatatctcaacgccttgcaggtcgctgcctcgtcgtcgatcttatactgaatgctcgagacacctgcagcaaatgctttggcgactcttaccctcgccaagaaaacaccgctcgtgacatttgtgtgtgtcgacctagtccataggaaatcaccagcttcggtcagaatggttgccaagacgactgatctctagaaagattgggagggatcagttttccataatgcttgacaagttcagatgtagtataactgctggacccatatcggtgacaaagtcaagtctactctcatggagaatcactgttacaggaacgaccctagaaatgtcgagtcttttactgagtattactgagtattctatccagaagagtatagcatcaatcagatggaaaacagcaagacggatcctgtagagagaccactcgcgcaggtcagatcgtcgtgtatcgtctgcccaacaaattcatctaaagctcgatgtcttcacgttgcttgcctcctgatatcggttggtccgattcataattcgatacaatgggtaggattgcggtctagggatacaactctagcttgcggaaagggatctattcttcccgctacctggatgcgaaagtcggtggtatagtacaagacaagagcgaaatatatgcatggtttcaacctgagtaaagagcgacagattggcatgcgctaaaccaacgagttcagtcgatcctgactttaggtccagggtgaatacccataggcgttacttggcccaccattggcctgcaagtcgaagtcaaagtcagattactctcaatcagagtgcgaccgatactatgctcacatagtggacctcgggtgcgggttggaaataagtgctatcgcgagtcgacaaatcgcgaagagggttattcagaagcaatgtagggcacagctcgtatctgcggacgatagtcagttcagagactacctgattatagtttgttccagcgggttgcaacttacacatcctgactgatagcgtttcgaggctgtccacggctgttatccgctcgctgaacgatgtgaagccgagcttctggagagatcatatcctctgtatagcccctgttcaatagcataatttcagcttgacagggacagccttcctcaaggactgctcacattgggccaggtacgggtacgccatgttcgggattagcgctggtcccgctgtgagggaggttatcttatgagtctttgttgctaacccccttcagtacgggccgttccgactcactcccatgaacacctcaaatccttggcacaatatatctgaagcaaccttccatcaccaatatgtcggatctccatgaagggcgcggagaagagcacgacatagggcggatggaaaccgacgctctcgggtcgtccttcccactcgatcgcacgcatgtctcggtttgggtatccatgtcgatcgacaaagaacccgaacgtgtcataaatgagcaggaactcgctttctgtagaccggaagatgcctaaaggtcgcgcgcctgcctcacatcttgatcgcagagcgccgagggctgcgtcattcttcacccgagccgaatcgaagaccggaattgaaccaggattcaacctgcaagcgccacggatcagatttagtaaaggcacaagccatcaaccgtcctgtggggactactcactctgtgagatcgatgatctcgaaacctttttggcagacgacgatgagtttgttacggaggaaatgcacgtggaaagcttcggatggcacgaagaagtcctggacgaaggggagtttaagtcacgatatacgccaaataacgcttgccgacgactgactttgtacacccggaaccagtcgttcttggcattgaggaagtgtgtgaacgcccgtcggtttcgattctcgtccatttctcgccccgtgataggttccagacaacgaaagacgctgttgatctgtatgaggggcaaagttggttgagggcaaacgcagcggacgatctgcaaaaccactcacgcctttcttacgcagatagactacaagcgttcgtccgctaagttggccacaagcaaagtactgtacttcgtgcttgtcgcttagcttctgatgaccgcgaggcggcgggcctgtcgaatgactcgatggcacaagcgactccatagggtacgccagcagagtctgatcatgcgcaaagcaattagcccagacggaccgagacatatacgttcttgacccctaagaaagcgtaccttgtttgaaaggacaaggaaaaggctgaactgctccaatacggcacattgcgtcaccgctttcacgtgcaagaccttgcgaagcgctgtggttttcaatcgttagtttggtttgcgaggaaatcagacaggactggactgacatcgagggtccgatcttaatccgatccatactccctcggcgcacccgatggctactaattctcgattatccacagttcctgtgattaggcacaagtcgcttagtgtcggtggcggaattcgacctaactttctgccttacggaagggtaccgagcacgtcacacgaccggtgaaagcctgctgatcctctggtctcactaccgggttcaaaccgtaaagggaagatgcatagaaagtgtcgagcgccagcgcattcagttcaaagatctgattgtccacagagttaatcgttttggcgggaccgtctgtgcgcgccagatgaatctcactttgttcgcttcgatatctgcgctacgcaacgccttggcgtgaagcagcttttgctgccattccttcctgcttgcctcggaatcagcccataaggtgtattgacctccaagttgtcctgatcccatgaaactgaaagtgaacggatatactgtcctggactccgagtcggatgcaggtgtagtgctgctttcatgccgttcactcctgaacgttctcagcagaccgactcggcgactctgcgggggatcgtggaaactaccgagtgtcaatagctctagaggaataggctgaagcatgacctcagattagctgaagcatcggtcctggtatgcttgccgaaactcacctttctgttgatgtaatatcgaggcggtacgtttgagctggttttcgactttccgactttggtcagaacgacttaggtgccatggggatgcgaaatcagcaaaggaccgtaagcccaacaataccagacgtacagaaattgttgaacagcaaagcatgcagttccgaccaagaagctgtgattgtaccttcaggttgacgtagtagtcgacctttatgcacgagctctctcattgggttcgtaagatccaaatcattgacgatctccttgccaaatttcccccctgacaacgagtcaggtagttgccatagcgaaacttttgctgaagattcttccactcccttttcgatgagtttcccttgagaatcaatcagttcgaccacttcaggaatggtaaagatgtcgagattttctgcctgatccgttcttgtgagatgtttcaagatgtccttgagaaggagtgtgtacctgagcaatcttggtaccggtctatatgcaaaatgtccgatatcctgtctattcgtgcctgacgcattccgacattgctgttcaatcatgatcgtaagcggtggcgcgtcggtacgcgactcgaagtaccgatcggcttacatcaaggaatgcggcaaacttcgggttggttctgcgctcatgttcccaagcatacttcgcctttggataatggctaccatactctatgatggcatcctgccacctcaatgcagcatcgtaaatgaggtcactcacggacccgacacgtggatgttgctcctcctgtcgagcatgaagcttctcaaggaggtcggtatgaatctctagcaaactgcggtaattgtggaaaacgtcgtctagaaagatttcaagccgcagtctgtccacaatcggttcgtcggccgagcgcaacccgtcgatatacacctatagatcatgacaaggctgtcagcaaagacggcctcgctgaaggatcaggtacgtaccgtttcgatgactcgcagatctgctacataggtcatctctccctgaatcaactcccagattgtgctataccaagagtcatgagcgccggtcgctcgttgtcggactgacgctggagatgtgctgctcactgttgcactttcttctcgtcttcggtcatcacagccatgtcctcgactgcgacgaattccgaccagggcttgtccagcatattcgcttggtgcgcaactcgttcgcgctggaccaaggcgtcatccgtagaagggatctcttcacgatttgcagaggcttgccatacctttagctgtgcagtaagacttagatttcggatggctttgatggcttcgaccaggaaagtagcgtccgggctctcatctgaagtctcgctgagaatggcctcgagaatctggggatatcggttgagttgggtagcaggccgcgtgatgaggtatttgatgtccattcgtcggttctcgttttgcctgacgacacgctgaaaacaaggaaccaaggtaagtaagccaatctcgacgttctcgcggagggtctggactcacatctacgaagaatctaaaattggaattgttcgccaactcttcccgcagacgctcttcagctctgggtagccgaccgatatagtctgggtagaggtatcggaattcggcagctgcggtcaagtagacatccccgatcgtgctgattatacccccttgctcgcgttgcctttctgtaaagaactcgagcaaactcgtgttggctgcgcgtagctcgaggatattgccaaacagggtcgatatcaagtcttcgaggtccttgagagacctgatgaccggcggttgtgccaatcgcagcggactgatgaatagctgtaggtaaagagaagttcagaccgaggcagccaaccttcatactagcctccgctcgacgaactgtttctacggcgttcaaatcggcttcatattgctcctccgcttggatggcctggtatatgatgctaatcaagcaattcaacatcagtatactgtctgatgctatcggggcagaaaaacccacttctgacgtctcttttcagactcggacatctgatcgatcagcgcttgatccacccggcgagaccatgtctgcgctctgggttctttctctgacgacgtgctctgagacgtccctgctaccttgctggatgaaaggaaagtctcctggatatagcaaggtgtcagcagccgagccagaggccgatcaattttaggggacgtaccggactgattctgaacggacacattggcgagtagcatccacccgtccccacaccctgacagctcgggctataacacttggttgccatcgtttcgacgcccctatatacgccgtgtctgaagatcaggtatacgtgtcgcctcaggatacaaacgatacttacgtggggaattcataagtgcttcctagcagcccttcgatctcattcatgaattggtagacatcctcgatcgaatcgctgagtggcttgtcgtcccaatcaacctcgacgaatagcagctgtttctgcaacgagtgtgcgacagtcaaggcaaagcgcctatcattgcttgacgtccgagtgtgctccggcatgaaagaatgaatcgtggtctttgaaggcatactagattcaaccactgtacatacagcagcgggttcggctcggtactcacgacgatatctctgccggtgaaactttttggccaaggtatcccgcccttgatgtgactgttcctctctaccctgtctcgcagctgaacactgacgtgactcaacagactcgggctgaaaaagttcatctcgttctgttcttccgcctcctcttcgtcgtattcctcttcaaactcttcgtcaaagtatccatccacctgtccatcttcgcccgtgacgtcgcccatactggtaggagaaaatcccgcagcgtgagactgatgcagaaagagcttgttttgaacccatcttgccgggggtcttccttcctgattctgctccaaccaggaaggtgctagggaacccctatgctgaagttgagggtcacgggaataggtccttctgtgttgcaaggcgtcttgtgggtgagagggaccttcaccgaaagtgcgtacggattgtggtaatgatacgacactttcccggtgagttccatcgccaggtcctggaccgtaagggtaatcaaattttctctgctctggcccgccgctagctggcatgccatcggtgctctgacttgaattcagcgaatccgacgacatgagatgcgcctcgcttccttgttgacggtgatacgaatccacgatcgacggagaataatcttccggctcgtccgacacggaaagactggcgagatattcctggccaaaggaccggccctgtcttggctgtccgtcggattgctcctgttccgagcctttagggggtgccgcgaaatagtccggctgatcccttcggtccgtcgctcggggagtcgcttgaccaccatcccccaaatcatcatctctcctctcactcgaaagttcggcaaagttccgacctttctgatccggctgaaaagcggctgtgggcggagggaggaccgggtaacctggcggcatgccggggaacgttggcggtggcatgtacgacggcaggaagctaccggggggaacgaaaggtggtggtggtgggggaagggatcctgcggggtacatgaagccatttactccgaccggactgccataaactgggtttggaagcgagaatccagggaatgacggggttcctgtataaccgatgggatacggactgggcgaagggaggggtaacggtgtgctggcaggagtcgaattgcttaggtatgatggattgggtgacggaatgggcggtggtaggggtctcgcaacatgcgtcgcttccggattcgcaggtaatggtcgtctcgaagcggtggaagctcgtttcacatcggcgtgaatcatgctttccccttgtcgattcggcatagacctgtgatccacgttattcccggattgaggaggtggtccaaagtcccaatcgttgggagctactggactagaagctcctgggggtgctggcaacggtcgtcgacccgtcatgcttgacgaccgattccccgctgtatctctgggaggaaccgggagattccgccgaccgagactcgcctgtgtgccagtactggggccatgactgatcggtattccgggagtgattggtgaggtagggccgtcataaggaggtcgatcatagttgagatagccaggaggcagttcgccagcgttgccattgcccatccggtttaccggctgtccgtaagattcgtccgcgaagtcattcaggtctgtcaatgcaggtctgagttgcggccggtgctgatcaaatactggaggctgagtcgatgtcatataagaagggacatcttgctgatgtgccggcgagtgagtgtagtgattgctcatggccgttttaacgtgtcgagacggacgtgatcaccgagtcgcatctccaggtcgcttctgtcaagacgcacggcaaagggcgatcctgaggcccgatcgctttagcaaaggtcgtccccgcaaatgatagtcgattgagacaagatgaggcggtcaccactgcgatcaaaccggcggtgtacgataggactagctgcttgtcgtctggccatcttgtcgttgccgatgtcgttgtgattttgaagctgtgctgcaagtcgctgccccctaaggtgtatgacgacagcccaaagcacggacatcagcttgaactggacctccacctctgacggtcacacacaacgtggtagcgtaacgtagcgttacgctatcaaaaacatgctcatgtccgtcaattcggccgcatcatcacccgatcatggcagcgatcaagcagtcagttgtgtcgcaacatcatcatttcgcgatatcgtcaaatcgttcagacgatcctgacccttaactttatcgaacgatacacatccaagtatccctttgagctcatctgaagaaccgaaattacgcccgagcccgaccagtctgcacgatcatgtcggccaacctccccaagcgtattctcaaggtacgtcatcgaattagcaatcgaccgataccttgaagtccattgaggagtgagacatacctcaggtgtcagacgggctgaccccatgttttttctcccgttttctacttgacaggagactgagcgtctcgtagccgactcgccgcctggtatcgaggcccaccctcatgaggacaacttgcgttatttcgatgtcaagattcatggccctgacggcagcgcctttgagggtacgcaccgaaaccgatagattcatagacgaatggcaacggttgctgatgttcggcgcaccgtttcggatgaccttgtccatcgggactcgcaggcggaatcttcaagctggaattgttcttgccagaggactatcctatggcgcctcccaaagtcaggtttctcaccaagatctaccaccccaacatcggtaagctatcaactctctcccccaatttatgtcgcatatccgacacccggctgataacctcggctgccatgtcgtatctgtgcgatacagacaagctcggaaggatctgtctcgatatcctgaaagacaagtggtcgccagcgctccagatccgaactgtactgctctccgtacaagctctcttgggagcacccaaccccgatgaccctctcgccgtgagtctcgagagttctgtcatctcctcattctctggctaactcacgatcgggtttgctttacggcgtcccgacagaatgatgtggcacaacactacaaggacgacgagaagggtgccatcgccgtctcgaaagagtggactcagaagttcgccgtctagtcggtatcgaacccgtcttcccggtacacagcataccgtacctcgggcttgatcagagtcctcttgttatctcctcctttcccctctttgcgccttgtttcctatcgagcctcttgttttacacctggtcgtgatctatacagtatgttgaaaaggtctacttatgtctattcggtgacctcggtcccgtggcaaagcaagatctcgagtccgagcacgtcttgaagcatgacttctggagacactgcaaaatgtcgccctatgaggggtcgcgaactggagttccaggtttccgatatttcaatcgttcgatataagtggtaaagggatcggtggggctgatcattgctggaggaaccataagatcattgtgcctcgattttatacaacctgccagtcctgttgtatgaagccacaatttccattcgacacagcaagacggtagagctcccaaacgacccgtagaggacgcttggtattgactggggtggcagggtcagagcaaaaggcttgaagatgtaaaggcgtgaggaggacggcccagagaaaactgattcgaaatattcataaggaggtttcaacacgagtcccaaaggcccgccttgtacatgttcggaatccgacgtaaatacgtacagcccatacttcctatacccaaaacatctcgagtccatttccccgcgagttcccaggccgaccgcacccgcttcactgagcgaaatacggtccgaccttggcctcttccccctgggcatagatgacgttcaagacggccgccaacctgatccccgctttacccaaaagggcttcaaagaccttgtcattggtgatccgttcaaagtactcgccgtcgtccaattcgacccccgggtgataacccttgggccaggcgtaggcgcagttgtatggatggagtgcttttccccaggtgtaaggacacgcggggagccagcccgaggtcagggaagcgacgtcgacgtattccgcaggggtgggaggggcgagcaaaccggtgttaatcaaggcgtttccccaaccggtaggaagcgcggcgaggacgatttttcctacattctcccactttccttctccttctcctgcccctccttcgaactcgctcacgcccacttcgtcgttggtcgggaaatgttccccctcggcgggacaatcgaaccaccccttgctgctctccttccaccatccccagatcccttccttgacgatgaacctgacgtagggatcgtagatgttccccttcaaggccgactcgatctgtttattccccgtgcccgtcgtatagttgcccagagtggcgatcttgcggaggagaatgctgctatcccagaccgagtggagtttctgacgacgtccgtagaaactgacccaggctgtcgagtccggtcggcagatgaaaatcccgggggagtgaacgaggtccaacgaattccgtaccatactgctacgcgaggggctcaccatcgttgcctcctctcaagtacccggtcagatgtaagggctgatgaatatcccccatgaaatggatcaagtacctcagattctcgtcatcttctcttccactattccgccgtatgatgtcgttagagtcagctcatggtatagaggcgacaatgggaaggaacgcctaggtactgacaatgtgccgttgaggagactcctggtcttttcatggatggccgtgacgacgttgaccctgcatttctcaacgaatcagcaaatcatctcgcccagtatggtattgggttggcaagaatctccagagaacgagaacagacatcaaaaccgatgtagacactcacttgtcgttggtccaaccctcttcgccaaacgtacaagtttctccgggcttgtccgatcgagctgtaatccccccgcgttccaattgcgatcgatcagcctctctacctcctagccaatccacttgaagaggaacaagacgactcggagcgagttggaactgaactgacgattgatataatgcatcggacccgtctctgggtgtctccccctgatggtatccgcccacgcggcgacgggggccaggtgacacccggcttcgggcggcaggatcttgcagagagcttctttcgctgtggggtggagatgaatctgggcgatggtagctacgatcttgtggcctgcgtcatggtcataggtgcaaatgaaaagtcggatcaggacgagtcgagttgatgaggaaagggaagggggaggactgaccatcttgaccccaggcagcggcttgggtagcgaggcaggtgaggagggtggtgattgccagcaccttcatcttgaagatcggctcgttgctttgtcttgttctgagcccgaatgtactacgaggtcgaaaagatgagtatgatttccgagttgatgaaatgaatactctgaccctttgactctaaccctacacactcgcttccatggggaacgtgatatcatcattccatcattcctcgccttatctcaaccaaaccggaagcaaatagatcaatcacctcacctcacctgcccgaatcaactccccctttgccggcccttccccgcacttgttcactttgccagtgatgggttgggtgaatgacggtaatttgattccggcttcatcctccccccgccgcctagtcgcggccccgcggcccgactcgatcacgaaaaagatcaaacagctagcagctagtcgggtcgggttgggtcgggttgggttgggtatatacaaacacatcgacacgaacatccatcgatcgaccgccacctcgaccatcatcgtcgatccccgcgcctcgcaatccacaacgatgaacccctcttcactccccacgtccacaacggacaacccacccgcagcaccccaggtcaaacccaaccccaaggccaccccttacaagaccgaacccgaatcctcgctccctcccaaacccgatcctaccaccgagaatgaccctaccatctccaacggacctaccatggtcgacgtatcgggtcctcacccccccactccggatttcaagatcgccaagggtgcccaggtaggcgacgtcgattactttgaccaggtgctcgccggttcgggcgtccacccgaacaagacccgggcgggtgacaaggtcgccgcgtgcgccaacgacgtcgtcgagctattggccctgcagaacagttcgtccgtctgggtgtttgatgatgcgaaacaggtcggattcggagccaagttgttggcatgggcagaggatcagtcgaatgatctcgcaggcactgaagtcgtcgagcttcagacccgagcgggagcaggatcgggtctcgccgggttcttgagcggcaaggtcgccaagtcgaccacgacgacggtcattgcgacgacggcgacgttgccactcttgttgcccgtcctcgccgctctgccccgtgataccgccgacacgggcaagatcgtcattcacctcgccacgacgaccgtctcttccgacgcctcgctcgcgtttatcgactcgttggattccttcgtcccccgtctcccctcgattccttcagacaggttcaccgtcctcttctcctcgaccccgaccgggatcgctcggtcggccgcttcggcgtacagcgagcacaacgaacgggacgtcatccacgtcgtagagtcaacgtttgccggtcgacagatcgtcgactcgctcgaggttccccaggtccccatctcgcacccagagccagcgttcgaggtgtacggcaaggtcgacgcggcttcgaccgtcttgctcgtcctcgccggacacgtcgccaaccagctcgtcgccgctctgccttctccatccaaatcaaagtccagctcggcggcggcggcggcggccatcatcgtcatccgttcgtgggaccacgccacgggattgcacaagttgatccctgggacgtctaaatcgcagaaactctacctcgtcaacgagtctgaatccgcccggttggtgttcaaggaaaacgtcctctcggcgttgtacgaccctcaagggtcttcgtccaaggtcgtcttcccctgtatccgatcgatcgtcgtccctacggacaaggacgccgtcgaggtcgtcaacgagaccatccccggtgccctttccacgtccacgtccacgtcgaccgagcaggacaaggtcaagacggtctcgttctacaccagccagacggaacccttgcctgaactcttggcacagctgttcggagccagtccttcattgtccaccacgttggataggttcggatcgagcgttgcccagggtgtcaaatcggtgctccaactccgacctcgtgacacccacacccacgccgatgcccacgccccggccccggccgctcccgtcgtcgtccagggtgaacagagcgacgtggtctggatcaccgaaccccagatcatcaagcaaaacgacgtctttagctcgttgaagcgcaactcgctcgtcgtcctcgtcgtcccctgggccgaggtcgaggtcgctagcaagctcacccgggccgagagggaagcgatcaagagcaagaacgcacgggtgtttttgctctccccgaccaacaacccgatcgtccaagaggtcgcgttcctgatgatgtacacgagcagcaagatgttgtctgaaaacgtcaaatccgttctcaacgcttattacgatggtaacttgccccgggaggccatcgaggaggctcaggccaatttgaccgaggtcgccgatgtccagcagtggagcgtcgacgtcgaggtcggggaagaggacaaggaagaggtcgtcaagagcggttgggagtgggacgccgtggccggtcgggccggactcgtcgatacgcacaccgaggggaaacctctacgtggggattgggcgttggccgccaagcatttcctgttcaaggaagctttcgagtatggcgccgaggtcgaaagggacgaagagttgaaggaaaaggccatcctcgaattgaggcccagtctcgaggacaagacctacctcgtcaaggtctcggagaaccgtcgattgacacccgagacctacgatcgaaacgtctttcacatcgcgttcgacacgaccgggaccggtctctcgtacgaggtcggcgaggccctcgggattcacgggtggaacgacgccgacgaggttcgcgatttcatctcgtggtacggactcaatgccgacgatctcgtcagcgtgcccagtcctcacgatggtggagcgacgtacgagacgaggaccgtgttccagctcatgcagcaaaacttggacgtctttggtaaaccgggcaagagcttttacgcctcgctttccagtctggctaccaacaagaacgaggagaggacgttgcgtttcatcgccgcgcccgagggagtggccctgttcaagaaaatgtccgaagtcgagacggtcacgtttgccgacgtcctccgtcagttcaagtcggcccgaccttcgatcgaggaactcgtcggtctgattcccgagatcaaacctcgacactactcgatcgcctcgtccaacgccgccgtcggggacctcgtcgaactcttgatcgtcaccgtcgattgggctaccccgagcgggaccccgaggtacggtcagtgtacccgatacctcgccggtctccccgtcggagccgaggtcaccgtctcgatcaagcccagtgtcatgaaattgccccctctcgacacccagccgatcatcatggccggtctcggaaccggtgccgcgcccttccgagctttcatccagtaccgtgcttggcaaaagagccaggggattgaggtcggacccatggtctactactttggttctcgttacaggtcgcaagagtacctctacgtgagtgggccttttctgtccaggtcgtgtgtggtatgatgactatcctttactgacaaccttggtcattctcatacgtctcgcagggagaagagatcgaggcttacattgccggaggagtcgtcacccacgccggtctcgccttttcgcgtgacggcaaggagaaatcctacatccagcacaagatgggtcaagacaaggccatgctcgccaagatgctcaccgccgaaaaggatgccgacaaggcctacttttacctctgtggacctacgtggcccgtgcccgacgtctacgaggcgctcgtcggttcgctcaccgagaacgccggcaagtcgagggaggctgccgaggagtacatggacgagctcaaggaggccgagcgatacgtcctcgaggtgtactagacgcgcaaaggctcgtgtcagggagggttgtttgtaatcatgccattgtcaccatagacgcgatcatcaactatagatggcccgacggcccttatcgttctcccatgccgcacttgtcccagggtcagctttgcatgtcgtcgatgagttcagtgtgggccatttttgctggcagctcttttcatacactatcttgtggtcgattatgatgatgtcgaagacttgggctttgtcagaacgctgacatcgttgaccccatcagaggtttctgtccttctgtacccatactatacggtgcctatgtagcgtctgcaatcttgtccgctttgccatctcgatcttgagaggtttacctgattcgaaagatcacctttagagcctttggtttttccccatcagatctgcctctttttgtagaggacgggggttccagtaattctgcctgaagaacaagccgcgctcaagcaaaccttctggacagtgggaaacccaaaggtcaagaccattccctacgaacaggtcacagaaaggttgctgcaaaagtttggctttctcaaagactgggcagccaacctggacacgaaaatgcctccctggccgtgctctccgacccggcgtttacgcctgttgcacgtcgccatgcacctgatcgatttcgtcaagatcactcgaccccctgggatcatagctcccaagggtcacagtgatcaaatccagcagtccatctcctaccgcgttgataaatgtaggatcatcattttgatggcaaataagcgagtcgccgaggaagaggccgagtcttactgtacgctgacctcgctgccctacggacaggtatacatgcgggtctcaaccctcatcatcaccttgaggtgagatttgttgcacattgtcaaatagtcgataaattccgccctgtctggatatgagctttcagcccttgacgaggccatcctcgggtcaacgacttcggtcatgtccgaccggatcactcgccgaagttgacgagtttcgagtccaacttccgctagacaccaacaaatccttatcatttagtactgtacaccctgaaattcggttgtacacagcaagtcgtttgctcatgctctgactgtctcgtcaagagttgcattttcaacgagaagatcaggatgatgctcaaccaagccgagctcgagaagctcaagattcccgagctcaaaaagctatgcaaagaggtgcgacccatcgatcgatctggcatgtgaccgcagaattgataaagatgttggcacggacgagaacagcacaatgtgcctgcatacagtaaattgaacaagaacgacttgatcgacaagatcgtgcatgctctggcagccccatcaagagagacccttaccgaagctcccgtcgtcgaatccgccatcactacaggtacaacctccgctcttcaaattccacctcgttatgcacctctttcgcaagctccggcatctaaacgagagcctgaatacgcagcgagcgagccgccacgctcttctaaaagcgtcaggggtcggtcagcctcatcagggtccagaaagaatagcaggccggtggaaagcgaagctgttcaaggacgtacgaatacgacggccgctcctatcctaaacgtcagccctccccgggtcgtcaggaataccatcacgtctccttgcaagagtagtatgctcgcgatcggtgcttcggcgatttcgacaatggttcccgctgctgcccttgccctctccggtaacgccaaccctttcccaacctcaagccgcatgagacctccctttccgccatctcaagcgagatcgagtagttccaccacccctgcgattcctcccaatccaacttcggcgacccccacatccgcgccgatcgtaaggcgtaaacccaaacggcagatgatagagatgacggaagcggattacgccgagctggaacggctgaaacgacaaaaacattccggccgacctgttatcaggccatccaacgtgagtcgaatgcgaacctcttctaaatactgcgatggctgtttagacggtcgttgagaggatagggccgaaggagcgcatcgagcagtcagcaattgctcacgaagccgtcgagcctgagcatagccagtcagggatcaatgcctacgcctaccgaaccatccgccagcgcacctgttccgtcggccgctgctttatctcgtggaccggtcaagcaaccatctcaaccggccgcgatatcttcgcctgttcctagacctataaaagtgctatcaagagacgaaccaacacccccggcgacggccctatccacggacgcttcgatcccgcctatgtctcgttcgccgcgcacgacgtccaaaccatctccaaacccagtcgagacgcgtgcgccacatccagtgaccaacaccgccagcaaaaccactggcggcgatgccacggttcctacgaaacaaaatcccggcggaccgaccaccacttttcgttctgtaaaggccgccccgccccgcttgaatacggcagcccgagtcgaatcccgtctggataacgtaggcaacccgccgatgatcacaaagccgagagcacgatcaaaggctggtgaggaaaagtcgaggatgtcttccaactttcgaaccgtctcgggcaaggcgtcgaccaaattcgtgccgctcgttcccgtccgtctgcaggcagccagaggggattctgcgcccgttcccgaacccacagaacctgatattcctgaaaagccgctcgaattcccaatcggatgtacggcctcagtcgtcaacgggactatcaaaacgtcctttctggaaagactgtatcaaaccaacaaggctgctgctggacgttcaatccagggaagaatggcattcgacgggctagcggcccctatgttcgacggcagtcactcggcagaaagcttgaacgtcgcaatacgtttcgtcatcgctcggatccacactcagtttcagctcggcgaatggcaagacccagttggtttcgcaccggtgcgaagtgtccaaaaggtctgcgacgggatttgggtagcagaaacattgagattcaagaaggatcgatcggactgccaagtagaatcggccgtggatgctatcagaagaaaaagcatacccaagggaaagggcaatgggatagcgaaagtcagagacaggcctacagatacaaagatgatgcaagacgaaggatcgattgaacggccgatcgttcggtatctcctcgtcggcgagaccggagacgtgatctcgaaatcggagtggccgggtgacgcgcccatgtcttgcgacatcgcgctgagcgactttcatttgcgtcaagactggcatgcatacctcaagtgcatgatggaagaggcacaagtcgctgcgactgaagtcacgctgttggatcgagttcgaacgaaaaatccggaagactaccctcgagggatagctcgtacctggctagatcgaatgaaagatagcatgaacgctgacgttgtgcgagtagccaaaagatacatcttgagcaacgttgtcctcaataggtagagtcatgagtctcgacagtcaagcaataaccagctgagttgatgcttgtctgaccttcagtatcagtggcgagctgctttcagccatgcaaatggacgcaatttgcgctggaaaggccggctcagaagtcataccgaaggaatggaaaacggtctcgctctttcttccagagtgagtccgagctcgggaaatcttggcgggattttatcagctgacaacagtgtcaaagatcgcatcaggtagaagcagtcggattcacggtcgcggtgagcggcaaggggttcaacctccaccctgcaatcgcggtggtcgctcggaagactggagaggatttagtgctacgcacgacgggccaagtggttggaagcgtggaacagggtgtatcggaactttacaagcatctactcggatgcgacgatcggggagttgcgatcagtcaaaacgaagcgctaaatttggccgaagacttttggcgaggattcaaccaagtgcgagaggaagaaaaataacgttgcgatactggcatgtccaatctggattctcttcccacactagttgttacagacgctcccgaatttacgtcgatgcattgagcgtatctcactgcttctgcgcttcaacgaccttgccttcgagcttcttggccacctgcagagcacgaaaggatgaaagatcagcagggcccaatcgaatcgacggaaaagtatcgattccagactcgcctcctctccgatttcccttatccgggcttcgtccagaccgatgagagagacgtgtacccctgttgaatgcgactcttcaagagtcagctcccgtcccacatatatgccttggtccgctactagacgcacccttgtagagcatagggtaagatccgcatcgaattccgttcttcctctccctctcgtgcaattcggtcaagtagggagcgatcgaactctctgccatctcggtgaagaccaggagacggaacggcttggccgaatcgggtggaagagggaggtacggggtaagtgagaccaagaggttctcgaagagtgaggggataccggggaagatgcatagctatcgaacatgacttgcctggtcagacgagtcgagtcgctttcagacccgtaagcgctcaccttgcctcccagacggacgacggggacccatttatcctcagcgacaaagatgcaatcggcgccttgtccagtgggcagctgagccatcctttccctcgcctttctctgatccggggtctgagagtccgggtcaatgcctcgagctttgagaccggcttgcatcctcttgaccgtctcttggttcagctcgagagggaggttgaaagccttggccatggaggggtaggtaatatcgtccttgcgtcatacgtatcagctacgggttcggccggaataccgagaagcgcgaacggactcacatgggtaggtccgatcccaccggaacagacgacaaagtcgtatttctcggtcatccttctggcagcctcgacgatttcttgctcgtcatcggcaatgatctcgatcctcttgagctcgatacccaggtcgaaacattgcttggcgaaaaagttgctgttcgaatcgctgttacggttcgcgacaatccgttctgattaaaaacacttgcatacgagcgattttgatcttaatagaacttgccgagttttcccattcaacacctcgtctctatcgataattaacgggacaaaacgtgagcctctagctggtatgtttacagcaacggccgtcatacccaatgatgaggcatcctgccgtcttgatgtacttgccctcacctagaggcagagcgttcccctcgacaggggtgacagggaagctgatacttccgggttgagcactagaagaggccatattgcgttgctgcgcgataaagccggggtgaatgctcgataggcaagatcgtgaggtagggtttagtttagttagggtgcttgcgagtggtgagcggaactgcgagagtctgctccacatcgacaaggtctgctagtttgatggtccgtatacgatcttcgtgatcttttacggctttgcgagaacaagttgaagatcgtcgaggtaatccgtttgaccgggaaggtcgacagcaaacgaggtgagttgcatatcgtggggtgaatgcgacctcgatcgaccgtcatcgaccgtcgatctctcgcgtcatactctgcttgaacgatggaattgatcccgaaatcacaagggacaccaaggagatactatacacctactctggccatgctatcatctggtggtatgtcatgccgtcctcgacgtcaacaccctacatattgtacagtcaactcgacccgaaacgtcaaacgtagtttaccggatgcccagcttctaggtcgtcttctgtttcttcttggccggctcgccgtcgccctcgccatccacgtccatcgcatcctcgtcgctatcctcgatcgtctctttgctctttgctgccttgtcgtccttggccttcggtgccgcctttgctgctggtttagcaggagcagcagcggatgcggcctttttgcctccaccggtgttggcctttttcttcttcaaagccttagactgagcctcccggaccatgtcgtccgtcacgtcactctgtgccccggcatcatcgtcgctctcgttatcggtatcctctggcgaactaggcgccgactcgtcgtcaaagtcttcgtcctctacatgctcacgtcggcgtcagtcatgccggacttggcgccaggtcgacacgacctcgtgcgactcacccgactcgtcatcctcgtcctctccgcctcgcctgtccttgccctggctcttcttggcaccccgtcgttcttcctcgctattgtcgagatcatcctctgaaccgagatccatagcgtccaaggtcctcatcgaggtgtcctctccgatctccttgaccctgacttttttgctctcgaggtatcccttgacgtgcttgtactcgtccttgttgaccgaggtgaaggtgtgctcgagatcgctagccagcttgaccgtgatgtcaaacgatcgcagcactcccgccaccctgggaaccgggtcaacaaaccgcagattcagcctcacgcacctacggcgagctcgaaccacgggaccactcgctcacctcgagatcgacgccttggtgatcttgctgtaatcgaccaagatgggcgtcttggcgacaaataatattgacttgtccaaaaagtgcaattctccctgcatcgccttgacgttgcacttgatgcatccgagatcggccgagctgcaacgaggtcgaggtaagcgagagcgaatcgcggtggccgggacctcatccacatcgcttggttggtcgtaccttcggaaatctccgggaccagtgatgggtttcttggctaaccgtttgaaaaggaccgatgtgatttcgtacgtgggtgccgagtagctcttgagcatcccagggtagtccttttcgatcttttcgctgaaaaaggacgatgacgaagccgaggttcagctgacccattcacactcctcgaccggcagatttctacgacggtagctcctggactcactcttcgatattgagctcgacatcgatctcttctgatacgtcccattgcatgatcaaccaagggtacttggtctgaccctgtcgaagaggaggatctagtccgacctatcgcgcgtcatcattcacgaccccagcggcatgcatcagctcctgcgcagttgcgagatgaccgtcaaatgcttacgatgagttgctgatacatctggtccgcacggggcaacaagaactgcctgtgaatgtgcttgtagaggaccttgtaatcgtaggttttcccatgcaaccgcaagtgttcctcgtgcatctcgatctcgtatcgacccctgtcatcgaggacgattccacggcgagaccgagaaaagacgattcggaaaggggggttgtcagggacgagatcttgacgccagagaaattcgtgacgactgacctcggggtgacgactgaaacgtcgacaaacgaagcgatggcgtccccggcctgttctccgagttcggcctggtccatgatggtcttgtgaaacatttccgcctgactgatctcgttgccatcggaatcgtacgtgacgtcgtccgggtcgacgtcgtcctcgtcctcttcatcgcccgacgcttgagagccggtacgactcttcttgcctgatcctcgttgcgggatgtaaaacctcatctctacgagctcgtcggcgggtcgttcgggtctcgtgcccggtgcggcggggacgacggggggagggttgaaatcgagagcgacctcgttcttgccggccatgtttgaattcgagatggacgtcagggggatctcgaacgagactcgttgttgtaccaagaacgcgaggtcgttggctgatcgatccacatgaaccgtaccgagcgtcagtccaagaggtccgagtggcgcgacgataggaacccgtcctcgagctcgaacgggggtccgacgactcacctcgaacgtccactttaccccaattccaacctttgacgctgatatccttgtgctccagctcaatctcaccgttcgtcaccccctgaatggcctttttcgcaatctccaggtcctgccatggtcggaagcgcaccggcgaatcagtctcacacatccaaatcgaatcgaatcgaatcgaatcgaatcgaatcgaatcgaatcgaatcgaatcgacgaaacgggcgaggacggatccactcacgtcccgtttgaggttgtcaaactgatgccgagtaccctcttttctggggtctttcgggtcgacgagcgtgatcctcaattcgtaaccccttgccaccctgttccacaacgaggggaggagcgaggacacagtcgatcgtcagggggtccatgtcgaacgcatttaggtggacagagggaatccgaggacgaggccatatgcaggggggggggcgtacctctgccactgcgcggccttgatctctcgaccgggaaacgtcactacgggttccctctcatctgtgcatttccaacccagaccggtatccaagatcctcaagtctgagcgcggaggagagaagagacgattcgtggatcattcagtccgtcgatctcggcctggggtttgctgcaggggagagcgaggagggaggacttacgacccggagctcgagcgctctgatggtacactgttggtaaatcgccgggtacgagaagcaaggatgacgatcgggtcagtctgtagctcggtttgtagtatcaccatccgttctctagctgttctaaacttgccatcctgcatatccagaagtttcttgccgcttgacatggtgggcgaacgaggtcgtgtgggttatgcaagggtttggttgtaggttcgttgtcgagacggtgtcgatgagcgggctgtgatggctgcggtgcgtgttcgacgagctcgttctttgtaggtctttttccggccgtcacaatggcaaggctgggagaacgtcaccacgattatgtgaatcagacttggctgtcaattgattgacgaatggaggagatgtagagagaggcaactgtaatcaccatcaccatcaccatcaccatatcaccatgtaccatattcgcgtctctctccatttcaacgcgcgcgcgccttttctccatttacagtaaaagggggacaacgagacagaaatcatcatgttcatgcgttcatgttcatgttcatgttcatatcaaccacaggtcatagagctaccacacacacactcacactcactcgtacaacgaaatccactcccgaaccatgtctttcccactcgaaggcccccatgcggccgataccctccctccaggtccggaagaacccgcacagaacgccttcatcgccggtctacaatccgccctcatgatctctcatcgaccgcccaagaaccccgtactcaagtggatctggaaaaagaggtgaggacaggccggcactggtctatctggtgcgatgtgaatgtcaccaattcatgctgataccgccgtcgactcgatcaggatgatgctcgaatcgacattctgcctgatcatgctcaacctctgggagaaactcctcgtcagtgagtaccaccacaccgctcccaccccacttcggccccagccaataccttagccagtgcctcgcccatttgatgcattactgacaccctgcatcctctccctgcatcgcagtgtccatcgtcggcctcttcttcgtcctcatctacatctccatcgtcaactacctgccctcttacctccacttcctgcgtaatcggatcgcctactacgtcttcggggacgagtctgtcccgctccttaacgatatttggagttggatcgggatcggtggcatcaagaccggggcggggatggcgggtgtcaacggggggtcgggagtgggtgaggaagggttgatggtcacgacgagagcggtcaaggtcgtcttcgatcgggcgaccacggcgatgatcaccgggtcgaacgtcttggacaagacggtcgaggtcgtggctacgggtcgaatggaactatgatccgaacggtcgggctcggaaacgactagactgtcatcgctatccccatcgccatcgctcccatctacgtcttacgccggtcgaccaatcttcgagggtgtttcgcaacggtcgggagccgcccatcatcacatagagatttacgattatcttacggaccttccacccgtcgaacactcctcccgcatgattgacatctcatcagccggggaaacccatgtcagaccatcgacaccgagtcggagtcacttccagtcaccgccagcgtgattatcatcgtcttcatcgtcaccatcgccatcaacgccgacgccgacgtcatcgttatcctcaccgtcatcgtcgggcccgtcctcatcctcattgttattattgtatacaaacaaaccgacccgactcgaagcgaccttctgggcatttccccgattctcccgatcatcggggttcggccctcttatactccagacgctccgctatacgtataattctcgtgtttgatggtatccgggtcgacacccgtgttcgttcgaccattcttccgaccagtgaagtcgatcgtcccgatcgtggcggcttgtacgcaaacgatccacatcggcatcgtcgtcgtcacagccaaagtcagggcgtgggctatgcatgtttccctacgaattcgatcttgagcgggttgttctgtcatcgtccacgaaaaggagatcagttcacctctacgtgtaagagcgagagagtgacatcgaggacgagtcagtgtggtggtagtgggtgggtggagagacttgccgtgatcctcagtgtacccgaataagctgttcatgcccatcccaagcgatcgaaacatgaccccggtcaacctccttttcccctccggacctgatcatcagcggctgaacgacgagtcgagggactcacttcctacgggtggattcttggtcaaatccttgtccgtctgtgcggtcgccaagagctggaacgctttcccctgagaagtctcgcaggtgatgtcgatggggcaggacgaaccgggtgtaggagctgaacagatcgggtcggcaaggaatgcgcagcggtcagtacggcttgatgcgagttcatgtcggatgaagaaatcgttgtgaggcgagaacgaactcagtttgactatgctcgggccctgggacgatccaggtagagacttagcctggtgatcgctcgtgatctccttgatcttgggcacttgctccgactcactggactcttttcgaaagcgaacacttcgaaccggaccaattgtctacctgctatacaatactggtacgaagcgtcgtccgcactggtatcgacgtcaacgatcaatcgatccccatccctcgacccctttcccggactcttgcactcacatgaacaacgtatcctgatctttaaacttttgcaaccacggcgggacatccttgactgctaatctgggcacgaacgtgttcgggatctcgaaagccgtcgtcgcagcctgtagagccgcttggaagtttggtggaagggagacgatacattccttgcccccgccgaccacgatggccaacctcgctggtgcgggtggaccggaaggagcggccggtttcttcggttcggcagggggttgggctgggggaggggggtcgccttaaagttggaagctgctaaccgtaatgaatgaagctaaattaaatgtatcagacgagtatggcggggggggggaataaaagtaccactttcaagcgatggggtcaggttagtacttgctttgacctgtcacgttgttgtagccatacaacgtatcagtttaggagattgatattcaatctattgatagtcatgctcgtcgatgatgctcgagatgacaagtagttacagtcacctagaatagctagcagctagcagccgcggtttattacctttgtgatggtggtccaagtagattctagtcttggccagtccagggtgaccttatgaattacgtactcgcttgagtcagcgacgcgcatacaaatcattcgctagagagcctagggctgggtgagcttccccaaattgtcaacaaaccatccatggatccatcgtgacctcgctcgacatcaacaacaaacaccacaggtccattccagtcaacaatctgcaacctgccaacaatcgctaccagcaacccggatcgtcatgaacgtctagtctggatctattctcaggaagccaccgacactaccgacaactcgcctcgacaaacgacgataaccgcccccgccgcccccggatcaatcagtcaacacaaaccggacgaacgaccatgttcgaacctgaacgttccgtctcaccggaacccatccaggttcatggtcgtctgcatcacctgaagggcaagaccaaggttatcaaacagacttatgatatcgactgtcccgtaattactataggaaggtgagcgtcgattgtcgactatcgactgggctatgcaaatgcgcaagccaaagcaaaggatgcgctcggactggaaagatgatgagctgatctgatcgtcgtcttgcttttgaattccgtcaccactcagggaccaggcgagtgatattcggatccacgcgttagacgtctcgaggacgcactgcaagatcacctttgacctcatcaccggcaaagtcagtacagatactctttcactctaccctcatgcccttctcccccggcgcgtgtgtcctttctcgaactcccccgaccgacactgaccatcgctccactcctcgactcgcaggccaccatcgagatcctctcgaaagccggactcaagatcaacaagaccctcttacccctagggaccgtccataccctccaagacggcgacgtcatctcggtagccgtccgtcggttcaagtttgaatacgtcgattcgggggaagggtcgaatttggaagttccttggttaccggactctcctgcccccgtcaggacgtacggtgcggcggtcgatcaggcaggggcggatggtgacttcgataccaagcaaggctcgagttcgaattcgaattcgatgcggggatcaccgtcgagatcgagcgcgaggccgagtgcccggttcacaggtgcatcgagccggaggaggaattcgacgaggttgcatctctttcccgaacacgctgcgagtagggagatcagggatgttctcctcgctctcgcgggtaacgtcaccgaggaagaagcccaggtcgatacaggcttgggcaagaagagagatctcgcctacatggagcaggtggacgaggatgaagaacaaggggtggctatcgaggaaaagatcctcgaggccgcgaattccccgatcaaggtgagcggtcggtcgaaacctcgcccgcccccttcccccttcctcttcgtccaaccctcgtcctgtttacatatacccgactgtctggaatcacgctcacccgcttgatccggatgatagccccgccgaacgctgcctcgatcgtttgcgaccccgcagccggtcaagaagatcttgaaggcaccgaggacgagcttggtaccgaggacaaagaagaatgtacgcatggccgtcgctgtcccggaggaacaagaagaagaaaaggaagaggttgtctctgtcaaccaggcgagtcaccagacctggactcgggtaagaagttctgactcaatgtatctgaccatcgactatccttctcaaacaggccgatgtccagaggacggatccaatgacccctcacagcgtgcccttgccgccgacggaagacactccctacgtgctccaaacgggactctacccctctctggacgaattcaaccaggacgggaacgattcgttcgattcggatggacctacaagtccgtcccccgtcgtacctggacagacgatgtacgcgacgcctacacccaagaacaagtttgtagacttgttggccagggaagagggcgtttccgggtcgatgaacaggaacgtcgggttcgagaccccgaggaatgtccccctacccacgtccatggatacaccgtatgcggccgagcgattcgaccaggacgacgacgaggaagaccaggatgtcgagatggaagacgtccaggacatacgggacgtatcgatggagcctccggcgaccccgcccaaggcgacacacctcgccgaggaagagacctcgcccatcacctacaacgacgagaaccaacctccagctcccgtctcccccgttcgcaacgaggtcgacttgcgttccctcatgcctctcacgcctaaaccgaggaccggacgcaactcgctgaggaggaaccttctcctgcatagctcgcaaaaggtcatggaagctcagctcgtccagaggcaaaggacgatgcaagctcaagctcaagcgtctgcaaagaacggccaatcttccgcgcctacgccgtctaggttccaagggacgccttacaagacggccttgccgagtcccggggcgacccactacgctagtagcgagagcgacgaagaggagcgggaagaggtggctttcgaggacgcgagcgatcatttcgatgaagaggaagagtacgaggatgtgagtggggcgtacgagactgatgcggaggagctcggtggagaggatgaagaggaggacgaggacgaggatgagcgggaggacgaggtgagtctgaggtggcagatctcgattcatgacgatagccgccaacgcaaccgatgacgactcgcagaccggggagccggcttcgcctgcgcaggtcaatgtcaatagcgtcagctcggcctcttttaccccctcgatccgtcgactcatcaatcaggagattgctgccgcaggagattcgtcggatgacgatgtcgaccgcagcctggatgtcgggccggacgaggactcggcttcagagcatgaggatgagcagcaagcgcaaatggaggatcaaccgtacgagcaggacggagaccagcttgagcgacagccagagtcggatgcgatggagcaggacaaagaagaggaagaagaagaagaagaagaagaagaagaagaagaatatgaggaggctcatgaggtcccgatcgaccctgctcttgttccgcttccagagactccagcgcaggtgagcgcgagccggcgacggtgacaaagtcgaaattcgtccaaactgaccgttcgtgtgtacaacgccttcagcgtaccctgggtcaacgatttttcacacctcaatatgaagcccgtaaatccgcccgtcgacagccgcgcaagtcgctttgcgatgatttcggcccacccgtcaagtttcaggccttgctggcgactccggtgagggaagccgtgaaccggatggactatgggatcgaagagcaaggcgaaaagagcgaggccgagtcagtcaagcaggagatcccagaggatgcgtccgaaaccgacagcgagcaatcaggggagcaaaccgttgaagctcccgcggaaccagtttcttaccaacaagagtacgagcaagccgagctgcggagacagcaagaggctgtgagtgaaacgatcagctggtgcctattcggggccgaatcgctgatattgcgcgccgcaatagtgggaccgacgccaaagagcgagtagccgccgtcgaacactacctgctcctccagccgatttcgagacccctcttctcgcacccaagccgctcgagctgcgaatcccggacacggcggaacatccagttctcgccggtcgagccgtcaacgacgtctctagcgacgaggacgagcccgtggtggcggaaaagaacccgctgtcggacatcaaatctcagctaaaggcgttgcgtcgaaagagcctgcaccgacaaagcgtaggacctttgggcggggcagtgaacgtgaacgacaggcgagccaccgttggattcgcccaaccatcgactcccaaagcatcttcccgtgtaccgcagcagttccactcggcagctcccgcctcgcgtttcgccgaaatcgcagcgcctcgcgccttcgtccctcacagtatggaagagcaaccgacagtctcgatgcgggatgtcaacccgtcgggagccgggtctattcaaaccgaaatgttaggagagtcggacgaagagtcggacgatggtcacagtcagatcgacgacgcagcttccgcccgttcggcagaatctgacaatgatatggaagtcgagcaggccgacgaatcgcaatcccagccggaacgctccgtgtctccacctagtgaagcgaccgaatctatggccaatttgaaactctcaaatgcccccgccactcccgagtaccggggtctgaaggagatgctcaacgtcaaggctcttcagacgccgaaattcaccggacttaaagagatgtacgccgaggtccgacaagcccagacacccctaatgaacgggatcaagaatatgtttgcgcagccggccaaccctagtaccccagatatgagcggactcaaacatatgatggctgagcctgctaacaaatcgacacctgatttcaacggattgcaagacgtcttgtatcagcagaacgaggcggaggaagagcagccggacgagcaagccagtatcgaagcggccgaggagtccgaacaagagaaagaggccgtgcgggagtctatgcaggagcctagctcggtcgttaagccatcaaggacgacgagtaaagccagcacggcggcaacgagtggcgcgagaacccgacgcaaggttgccgaacccgcggcaggcgaagaagctggtactagtaccgccactgctgcaacgacaacgaaacgcgcaacgacaacgactgctcgagcgactcgtacaaagccgcccgctgtgatcgaagactctgctccggtcaagaggacccgaacccggactgccgtagcttcggtcgagccagcccctgcccctgcggtgagagctactcgaaccaccaaggcatcaacgactgcgccggctcgtgccactcgaaccaaggcgagttcgacccctgaggtcgaggaggataccatcatcctggtcaagcctacgattcccagccgaatcggcagggcgaccgcctccaggtctacgacaactgcagctgcgacgaaaaagtctgcttcgttgaagaccacgacgacgacggcccctcaggcctctgaagaaagcggtgcagatgaactcgctctgaaacccaaggctcgagccacacgaacgacccgggctgtcaaggtggaagaaccgccagcgggtgagacggagactgccgctccgaaacgtcgaacagcgaggaccggcgccagcgatttgaccgcgcccactgctagcagcaaagccagggcgacgacgagcgcgactgcatctgcaacggcgagcgcgcccccggtgaagaaggctccggctacgaggacaagggcgacggtcacagctccggtcgcattggaagcggaagtggcggtaccgaagcgtgtgacgagggcgaggaagtagccaccgcgccgaggcttgctactcacgggatggaaaatgatatacgaatctcgcaagatcctcacactgttgtaatactagcttttcgaacctcttcttgtcgatctcgctagacgagaacatctgggtttcctttgatctttacgatatgtgcccattatcgcacgatcatccgactacaaaccctgtcttgacgatagctgtgctgaccttcggttcagcttgtgtgaacatacctgatttatctagatgtccttcatatttatccgacgtgttggacctcagtgcgattgctgcttgaaacgtcgttggatcgacctgaacaacggtatcaatcaggtttgcagcactgattatattcaattaagtgacattgataggaagacgttatgacagctatgcaagcacgttcaagcactaatggcaacaagagattccggtggcaacgttgaggatgtatagcagtccatgcgggaagttgcagtctcactacaatcacgcttcatcctttggcttccctccaaccaccggaacatagcatatcgctcattcgtcgattcggatcgcatctgagcatgacatgttgcatgttgaccatcccggcatcccgcgctcgttttagcgatctgacattcgcctcttagcctcttgtcaaggttcaaccaggaagcgcagatcacctacgaggggccaggatggaatatggaatacagtagtatacgatgattcctcccgcgcgcgcgtgtggcgtagaatatcacgagaacggtgttctcccggacgagagaataacaagatggtactctggccggggaagggggattattgaacaaggatttcgcccgcgatcaggtcgctggggcgtaacgcgaaggccgtgtgatcttgtgatcctgctaattcggggtcgtgttatttcgggaagagtcgtagagaatttgatgtttctgacgggacgactcgagtcccatcgtttggatgccaccgtatttgtatagcatgagcctgctggctgctggctcagcgagagcaagattgggcagatggtcagaggactatccaaatgggtgtgaggtgtaacatgtgggggcgacgagtgttcgattttccgtcgtgatggcagagatgggaccgatgtcgagcatggtcggtctcggtggggtctgattcgagccctcgttcctgtgtgatggcggttccttcttcattacgtcaacgagtcttaccgggtgacgacgatgaaggcgttgctggcggcaaggagcggcgtcatcgactcacgtgtgagcgaaaagaactcggaggtgtcgggtgaaatgcgggggtgagacaccgaattggttaaagggcggctgccggcggaaggggcagggtgatccgccggatgtaaagtacacagcctccataagtgggggacttcctgccgtgatcactggaatttacatcctcctgcgtgcttccgccgcgtctcctcctgtcgtcgcaactgttccctctccctctcgccctgccgtgccccccttttcggagaatgttggatgaacctccatcgacgcccgagaaactcggttcacaaaccgcccaaccaagcaaacacaaccccagccaaagagagcccgaccttgatcgacgtcaggattggccactaggatcagattcttccactcgccgacgattctctggtctcagagaataccgggtcgtagacatcataaatcaccatcatcacacaccgacacgggccgcgcgcgcaaggggccacaaagtttgacactttgggttgagcggcaaactgcaccatccgcctggacgacgtctgaaaccgacgacgcacctccatcatcgcctcgtcccgatcatctctggctaccgcttccaaacacgcaagagatacatttcagtataatcaggactgtagaatcctggaattcaggggcttgctttgaaacgcatcattagcggcgtcgtggtcgtcactcgagagagcgaagtacagaacagcaggtttccccgtcgaaacgtgaggacgagacgataagatgcaacgtgagtttgcctgctgttcccacctccttgacatgaatcccgcccatctacttcgagtcacccggactcccctagtacccctgagaagaggcgaagattacgttagctgatcatcaatcgtttcaatcccgtatgttttcactatcagctcggatataattccctcgagcctgaatcgctgcacagttgcttcatcgcacatttccaccaattgcgactttgatcttgattgctatcccgtcaatcacacctcatccagttagcctgcaaaccaatcggttcaatacccataccggacttgaaataggacgacgatcagctcgaggcgacacgttaccgacgcactagaaggcgaagatgaccgagattcagaaacgcactgcagacatcagccagacgggaacggatggatgtaggaggacgagggtgatcagcgggttcccgacgacacaccagttgcaaggagatctgctggatggctcggtcccgggatcgacatcaacgttgctgacggggccgagcgcttcgacatcgaggcactcgtacggcaggatctcttcgttcagcgaatcccgtccccgcaattcacctagacccgagaggctggtattgcacctcccggctgaagatcgaggacagtctctctgttcggatcaatttcaatctcgacatcaacatcaacatcaacatcaacaccgaccaacctccccactatcgaccacctcttccatccgatcgtcaccttcaccgtcttcttccccaaacagaggtttcatgagggagagaaagaggacgccgccattgttcacttcgaccccgttgcacatgcggatgaaccccgcgcccaaagtttcgatgcagggtggtggtcagctaaacgcagcaagggatctccttgcggctcagtcattggaggcagagagtcagcgaagtgggaagtcagggatgttaaggtcttccccttgctcaacgccgtgcttgtccccgtccactgagctggacttgatggagatcacctcggacgaagtgtgcgggacgccgcctgggagcatgaccaacgaagtcgggcgggaagccatgatcaggcaagcgtcagaagaggaacatcgacatcagaagcaagtacagcgagaaaggcaggtgccccctatcccggaagtcgtgcaaggagagggcaaggccagcgtcgagtctgggtcggtctcgctgctgacggcaatgatgcaagaacagcgaaagaaggagaccgacagacaagaccacagccggccttccagtagtcagggaccgaggcaggaacaagggcggcctcaaggtgctcaaggggatgcggccgggttggaatcagggctacaaggcgttgcaccttcttcagtggccggatcgacgacggggtcggggttgggagcgaacaacacgcccagacctatcttggtctgccaacccggatcaaactggcagtcgcacgctaccatgatctcggcaaacacctcggtcgccaatagcatagcgcaccggacgagcccctccgcgtcgcccaacagaaagttggcagggtgttccatcttgaggaaaccctcggacaagtggctcccatgcgaggccaacgggtccgcagaagtgggaatccagcctgaaagacccgcgagcccaagattgcaggcggctcttcagcctctcgaagaggtccccgcatcgacattgactgcaccgtctttgcaggtaccggtcgcaccgagaaagtcgagcttgacttttgccgtcgttccacctacttccgagtccagtctgcagagaaaagtctcggatggcaagaatgcatccacttcggtcacgttcaaaacgacatctgatgacgtggcgcctgtgagaagggtcttggcggacgaggtcatcatggaggacgaggatgaagacgaggatcaagacgaaggcacacgcgaagaccgagatggacaggagggtgaagcttcagacgaggatattgacggggcggaccgtaccttgttgacgcggcagcggttcaggggaagcggcgatggcatcgtcgagcaagacgaagccggaaccataaaggatgggtctttcgatcggcgtacggatctctcggacgaatacgacgatgacgacgaggacgaagatgaagaggaagaggaagacgacgacgacgatgacgatgcaagcatccgagatacccatcgaggtgactcgtatgacgccaacttgagcgaacaacccacgccgatgagcgaagtggtcgattcaatgtccgacacggatggcgacgaggacgaagaggaagaggacgaggacgataacgacgatgatctcgagctgaacgtcaatgggacagcatcggggtatgaagaagattcagaagccggcttttccagcgacgattcaggcgcacagcgtcgggcttcccgatctggagtgaccaagaccctcggccgatcgccgcgcccaaccaggttcaagctgcacgatagtcagcggctggtcgaggaaaaggaaggtgtcaaggagaccaaatttgtttcccctcggggtcggcgtggactatatcatgtgaggcgaggcaagctcgtcatggaggagcgtgatgccatgtaggtcctaacggttctctaagatcgcgttgttcatcgcttatcggttctcgtcggaaactatcagtcatacccctccccgcgagcgtcgcctatcgttacggacacagcaactcgacgtcgagatcgaggacgcgaccgaagcgcctccttcccatcgtcaccatcggtacgctttcgctcgtcctaccaactatcgccgtcgtcgaccggtctcggaagtccacgaagagatcgttggcggttctgcttcttcgttgatcagcccagggtcgtttgtgcgcattggtcaggatgcgcaagccgaggttgaacgcggacgaggtgccgtacagatccagcatgcactgcctcctcgggtccataatgccacggccgggaagtctggaaacgattcttgcacacgacaccgtagtccgccgcctagagctcgaacgaaacacgcacaactcggtcgttccgtttctgaccgggcgagctggatggttccgcccgcaggtctgtcccccagcgcgggccggctcaagattaagcgtggcgtaagcgattcgcctagaaaacgtcgagccaaagaggtcggctacggtaccgacgtgctagccctaggtcggcggtcgaagccaattccagacgactcgatcgtcgaggaagatccgagcgccatgtcggcggcgatgacgacgactgagaacgagacgactcccatacatccgggtccttcggcgttggccaaactctcagcacagagagggtggagaagcgacgatgccgtattcgctgcacctactgtcaagcggcaggtcgccgtcaagccgaggttggaaacgcagcaaatgtctcaaccgcgaagacgacccggtcctccgccgagcccacttcggccgacccggacgatgacctcggcgtcttcttcccgcaatgagagcgcatgtgagagcgaccagactgggctgagcggggcaggcgtaggcacaggccatcgcagcgcttccgagagaatggtcaacgggatgatcaatgtcctccgtcgagcttcaggttcggtccagccgttcttcaagactgaagggcttggcgaacgggacgttcactcacccgtctctcccgatgtagggacgagtttcggcgcgcaaggcgggatgacgctcgggctcgacacggcttccctaccccgaccttgcgaggtcgcgatcgacatgacgccggcattaggtatcaaagcgggtcccggtcgatcgtccgccccggctcaacaagtcttgcatcagacgctgaacagccgggcctcgtcgccctggtcgccgttgatgtcatcggatgaaacggcgccggggccaaggtccgcccgcgggaccccagaacatcatcaagaggacggcagatcggtctcgggctacatgactgagcctgtcaagctgtcttttaccgagccgggaaggagaggttcgcaacccgaagtcagggtcacgtctaggccgatacagtgtcccatgccaaagaggggtctgggcgtagaatgagtcagaggctataatcgatctacacgccctcgaggtcttttcgacgatcggtggggtagggtatataattcacgatcataagatgtggacctttgtaaaaaaacttcttgacgatgtaccgacaagtcatgacgtgtcggagaaacaaccgagatgtttgtctatagctccctagttcattttggttgaccatgtccctgtacggtggttgctcccttgtttccacctttcattcttttgcgcctcacgcgtacgactctcattctcggttatatccacctcactacgttacgtcacgctacttcaacaggttccgcgtccccgtcggccgagagttaccggttacttgatcggtcgaatggaaccgtagacgagaaaggggcagacgaaagatgtcatgacttcatatactctgcaatacccaaggtgtctattcttcttcacccgtagcaccgacgtcgtcagatacatacacctcaaagtcagtcgcattccatataatacctgcaaagcctgcttcgaaagtctattcaagactcgagcttatatcctaatcaccgctcagctcgataatcgcgtcgtcatctcgtcatacccaacctctcagacccaatcagacaagcttccctcgtccacaagcatggccgacgcacaattcgagaatgaagcgattaggcaggagaagatcaagggggagactaccaagcagaccgtatcccccgtcaagtcgttcctctcgggaggctttggtggaatgagcgccgtgctcgtcggtcagtccaccctcgctagacgtctgtattggtccacactcaagcgagactgacgaactatcggcatgacacccatacaggacatcctttcgaccttacaaagacccgactacagacggctgcaccgggaacttatacgggagctatcgatgtcgtgaaaaagacgttggcaagagacggagtcaaagggtgcgtaagctcggcaactacgaatgccaatacgcggaaaaggctgatcgggtgacgatcgatctcgatagaatgtaccgaggtatgggaccacctctgatcggagtcactcccatctttgccatttcattctgggtgagtctcgtcttcagcagacacagctcacgaggtaccccgagctgatgtcgattcccggtacagggttacgatatgggtaaacgagtcatctactcaatgaccccgaaccggacgactcaggcgttgagcaatgtcgagctcgccgcggccggtacgtcgtgtcgaccctacgagaactcgtcgcgggcaggaccagccaagctgatttaccccttgatatcttgtcaggtttcttgtcggcggtacctacgaccctggccacgggtccttttgagcgaatcaaagtcttgctccagattcaaggacaaggagccggggcgggtcccagctattcgggacctctggacgtcgtcaggcagttgtacaaggagggagggctgaggagcatcttccggggaacgggtgcgacgctcgcacgagatggacctggtagcgctgcgtgagtgcccgtacacatttgtggaccttcgcaaagtcgggtgggtggtctgatgatatcctcctctcttttgctttcgatgtgacttggacagatactttgtcgcttacgaggtcatgaagaagaggcttacccctgccggatcgaccgatttgtccttgcccgccgtcatggctgcgggagcgttcgccggagtggccatgtggagtatcgccatccctcccgacgtgagtcttcccgcttgtctctcctggcgctcccgtaatttcgtcaatactcaccccaatgttttcccccctcccttcacatcctttccgatcgtgtgtgcaacccacaggtcatcaaatcccggctacaatccgccccgaacgggacgtacaacgggttcacggactgcgttcgaaaaacgatcaaggcagacggggtgggagccttgtggaaaggattctcggcggccatggccagggccatcccagcgaacgtgagttgaagtgatctgcggtcgatcagagcggtctataccagatgcgagttttacccgggctgacgtgctcgtcgaacaggccgctacgtttgtcggcgtggagctgtcgttgagggcgatgaacaccctgtggtaggtgtcatggtaatgtcagtcagtcgagcatcaacaagaaggtgtgaaggaagaggtctcgtcctcgacgcgagagtaaggctcgggtgcctgaaccggtgtaatcgtcgcattgtctccattttttccgaaagcatacatgggaaactcgtttcaaagagccggcggcaatgagcccagcttgtgggcaggcaatgcaggtgcttgccgatgagtctcttgcgacaaaaaaaggagtttgagtatcacaagccgttcgtccagcacggtacttgaccggtgacccacaaaacaaggtgacgatcggatcgggcaaatctcaaatatccttgctgctagctactcgtgcgtagaagtagagcaggaaatgatcatcagggagtacgggagggcggacacctcggacaagcacacatgggtaggacgatcgatttgctttttgcttgcttgcggggtggggtccgcgcgcgctagaaccaacgcgagagcggatgcaggaggatagggggtgacggaccggttctactactctttctgtaccagctgtcaagagcaagagaacaagtacaggattgggaacagtctgagtaatggtatgcacgaaagatgtggaaaggcgagtctcattgccagaggatcttcgggtcgacggtctggtgaattgatttgctggttcatgcatggttcaactggtcgtcgacgtcgtcgtctgtactcctagtagtgtctagcttatctggaacttgtttgtttgttgtttatttgtttgttgctcgcgtaggctcgaacgcgttcgatcgagaagagcattattgggggaggacatcaaagacggcctcgatttcgacggcccggccaaagatatacgttctagggaggcacccagcggtttgagctgagcatatagcatacggatcatctgtaattgttctgaggtgatgatgaggactggtagaccggatgttcaagaaagagattgagattgagatacacgttgtgcgacgttttcggagccaaaccactctcccctgcccctgcccgtgctcacgttgccaacgataacgatgcgggaccctcgatagttactccaatgcaagcatctacccgaacgtcagatgaaagccctgtgtagtcgggtccgggacatcttgttggaggagagcaacgtccatcaggtctcttcccccgtgaccgtctgcggggacattcacgggcaattctgggacgtacacgagctgctcagacagggtgggatggtacccgatacgaattacatctttatggtcggtcgtcctgttcgggatctggagctcgagggtcagagctgatccgagttgggtttcacagggcgattttgtggatcgagggtattacagtctagagacgttctccctcttgatggcattgaaagcacggtaagtgcggagattacctagtcagattttttatgcgagctacgaacctgatctggtcgcaatcgtcctgcaggtatccggacaaggtcacgctgcttcgagggaatcacgagagtcggcagatcacccaggtttacgggttctacggtgaatacgacactttaattccatacaagcaacgtatcgacaggctgacatacgcttgcgacccaaagacgaatgccagacaaaatacggaaacgccgcggtctggaaagcatgctgtcaggtctttgatcacctcaacttggccgccgtgagcctggtctggttcgattcgcttgccgatcctcaccccgagctgactcggccatggtcccgtattgcagatcatcgacggtcaagttctctgtgtacatggaggtctctccccggatatccgcacgatcgatcaaatcagggtcatcgctcgggctcaggaagtaccacacgaaggagctttctgcggtacgtccagtcagatccgtgtacggcgggatcgagtgctcatcccgatcttgtcatcatttagacctcatgtggtcagatcctgatgatatcgacacctggtcggtcagtccaagaggcgctggatggctattcggagcccaggtcacacacgaggcaagtcgtctctcttcccttcaaaggggacaaatccttcgcttccccgctgacaactgccggaccaacagttcaaccacatcaacggcatctcattgatcgcccgagcacaccagctggtacaagaaggctacaaacacatgttcgacgacgccttggtgaccgtctggtccgcgccgaattactgttaccgatgtgggaattcggctagtatcatggaggtcaaggaggacggcaagacagagttcaaggtgtacatggctgcagaggagaacgatcgggatcccaaaaatgaggctgcaagaagggtgagcgcaggttcatatcgtcgaatcgcttttcccgatcggtagctgacggttgaaggagttcttgcacacctatagggcatgccttcatatttcgtatagacaaaagtccaggcccatcccgaccaggagaggaggagagagcccattctttttgtatgatatcgaggaccgtgttcatcatagatccgtccgagcgttgtatatagcaccatcatcgaatgcatcacaccgaaggatagctgatcttagcatgtcaatcaatatctcggatctgatttctcgcgcgaaccgccgcgaagttgaatgatatcgaggtagattattacaggggtaacgatcgattcgatctggacgttgggtgttcagctgcttggatccagtcagcgtcacctagaaaggcggtcatacaagagatagtggtttgagcatagtgccggccttttaagctggtcagcgacatacgggaccgaggttggcaataaaggagcggtgttcaaacaaaagttaaaggggagggactgcttttggaaggcttctacttgtccatgagcagggtctcgtgagtccgttttggttgaagaagggctttgggtgctgctcgctgtggggactgatcgccaatacctctgcttgcctccctgctcaggttgtagtgagctatcgccaacaggtcgctcagaaccgttggagaaacagctacgatcaccatggatcctcagcagaacggcactggtgtgccacagcagcaagcgggtggacagaatggcaacgttccgaacatggctcctaatcagagagtacaacagcctggaccgaaccagcaaggaggccctgctcagaacggacagcaacggcaggcgcagcaatcacagcagcagctaatgcagcagatcaacctcgagcagtttcaacggatgatgccggccgaagttcagcgagctccacagtctgagcagctggcctacatcaggaaattgataacgactcaaaaggccaggtcggggaatgcggcgaacgctgcggccggagctggtgtacagggacaggtgagctacccgattgagcaactctgcaagccgagtccagactgatacgtctacgtccattcacagcagactctgaacaccaacactgggactcaaggttctccacaagctccacagcaggcaggagcgaacatgcagaccgccccagtcaacatgcaagccaacggacgcccacctcaaaaccaccaacaggtcacgcccgaagcgatgcagagactcctggccactgcgcgacagaacccaactacgatgaactctttgacgcagatgatgggtcaagctcagttcccagcgggagctacacctcagcagcgagaggcactcgcacgttttgcccaacagaatcgtggtgggcaacagacccaaggtggagcagccgcggcagctcagctcgtggcacagactcaacgaatgatgcaagctcaacagcagcaggccttaggtaacggtggatcccctgtgcaagctcagccgaatcaaaatggaaacctgcctggaccccgaccgaatcagcaaggggtccagagtcagcctctccaggtgcaagctcagacgcagaacgacaacccgaaccaaggagtcgtgcaatccaatggcagtatcttaggaggaagagctcctccacctggaccgatatcgatgccttctcaagctggtcaagcgagaccgcccgttccggccgctgggggaatgaataccgctcagaaccccaacaatgctcagcagaggcccaacctaaacaaacaggcgttggatcagcaactcgcaaacatcttgtcaaaccttgacgtatttatccagaaaaaggagaacaatcaactcggcccggaagagacaaagatggtccgtatcttgcgttgtcctcgacaagcactgaagcaatagtgactaaccgagtaatcgtagctcaaccaagtcatcgcgctgcgaggaccaactctgatctctcaacaacaacagcaattgcagcaacagcagcaacaacaacagcaacagcaggcgcaagtcacaccgcaacagcaacagcatattcagcagaatctcgctcgacagtttcagcaggcgcgggctaacagtcagaatgggaacatcccccctgggggtgtccatacgggtgcgcacttggcagcctacaggcagttgcaatccgctcaagccgccgcccaaggtcaagctggcaacatggtgctctcgccgcaaaatatcggcatgatgaacatgaaccaagcagcaattgctgccaacatgggccagggaccttccagtcaaaacggaggaacatcgacacccggacaacaagcgaggatccagcaggccctagcgatgcaagcggggaatgctcaggccggagcaggcatgtcgatggggctatcgccacacaacatggatagtccgaattcggtttctggaagcaatgtcatgggggttccagccgcaaacatggcatatgagcggatagacaacttgggggaagagaagcggacgttggtattcgacaaggtgagtctctttcagcaaggtcggtcgttacatatcctggcagaaactcatcactcggacggaccgtcagaacccttctatccgcaagtcgtatatgcgttacctcagccagcaaagtcaagagaagagagcggccttgttcgcagaggtaagtcctgcagcactcgaccacagatatcgctccgaaagagtagagcagtggctgacaacggacgaccgcagcatgttgcccttggtgcgatgtatgagcagcacctcatggacgaacagaatgcgcaaaaccaactttcacagggcccacttcaaggacaggatggcaatgcccaggcgatgtcaggcgggcagcctgggggacaaatgaacttgcagctacctgccggccgacagcgacctcaggcgcaaggcaacaatggcggcgcgccaggtcctggtcgagccgggcctcaagcccaagcacctgccgggatgaaccttcagccaaacgccgccttgcaagctcagatgaacgctgctcagcagcaagccttggccgcacaaatccaggcccagaaccaactggctcaacagcaaagggaggtggcggcagcttctagccccgcgtccatgcacggcacgcctgttctacacaacgattcgggcctgccggtcgcacgaggaggcaccccggcaagggtaggatccttacaaggcggacgcggagtgcgtgcttccccaaatgtagctaatgctacggcggtaagtcttcagttgccctcttccgtcggtgtcgagacaagtgcactgacgaacaaatattcaggtgtcgatgccgaatcaggcgaacaatccgatgaaccagcagcagcgtatgcaggcgcaggcacaacttcagttggctcaagttgccaacaacgcccgagcccagttgcaagccaattaccactcccaggcccaaaatctgaacgccaatcaagccggccttgcaccacacatgcacggaccgcctggtggtattcctcctggagttcccgcgaatttgatgcctggtgttccccatcccggtcaaatcccgcccaatattgccaatttcattgctcagcccgtcatccacattacgcccaccgacatccgttcgttgatcatccctgatatcctcaccgagacggccaattctgcaccaaagcccgccaagtttctcgactatgtgcggccatctcgattatcgctgtcgaacggtcttggagccaatcactctatggcgatgccagtctactcggcacgtccgccagctttagaacaattgagcaccttgctcaaaggcaagaatggcagaacggctgcattgaagggcaccttgttcgacaaggcattctctgccgagccggaggaagaaaaggaagaaccgaaagtggacgatcgcccagccatcgaagtcgtggaagaagagaatgagcaccgaagcgaggttggcaagcgctcacctggacaaatgtcggttgatgaggtcgaggaggaaactacaattcatcctcgtgttaagagacgcaagctgtgcgacgtcgcaaaattggccaaacgcgacttgacgattagtgaagggtccgaagaggtcagtctggatggaacccatatggttaggtcatttattgacgcttaccaaatatgctattgcacagtttctcctccaactttgtgacgagttcattgaatcggcgttagagaccagctgtcgcctagccaaacatcgcaagagcaacaagctggagatcaaggacatgcagttccttctcggtaagcctgatggactcgggagccacctggcccatatcgctaagacaaagcgtcgcgctcagcccacaactatgacgtacaacttcccggttacgcgtctgatgcaattcgtatcgagcagaacaaggccgacctcagagcgatcgctagttcgattccgtccagtcgagcgtcacggctcaatgccgttcagcaagcaaagtccggagccaaagtgaaaggctgatggcttttgtttagtagtcttagtattcgaagcatacgttgtatccattcatcaagagccagcaaaagtgtacctgagcgattcaaaagtagcgtcatccgcgtttgaaacgcgtctgagccagcccagatcgcaaatatggtcaggaaaggcgcgtggccgataggtataagaagagaagcagcaacaactttaaactccttgtgatctgttcttgttactatggtagcagaccatttccctcggatcatccttcagacgagcgatccgcgctcagagcacctttgttggccctcgaacaactagaattaaggtttcgtatacacggccatgtcgggatcgccgtcttctttcagcagcggcaattcgggctataccggttcagtccgaagcatcctcttgaggcagggctcggagtcgtccgccacttccaccaattcttcgaccagccaattcccaaagctgagcttttatcttccacctcacccccgtacgtccgcgccagaggatcccctttgctggtcaaagggaacggaaggcccgcccatggtcacttacaagattgagacccgtcaaagcaggagcggtcgagtgatcggcggactcctcgatcgggtcggccttggaggtctgaatccatgttccgagaagatcacctttattccagtctcttcgactgagctggagggggacgctcgtaagcggaagaagcgatcgcgctcgaagcgccacaatggtccaggttcaacggacccctatgctgagactttcctcccggaagatctatatatcctcccaggagtgaagccgcttgattaccgtatggcagcaatatcgcacaagctcgattggctcgcctggaaaaacgctgcggcgccgcctcctgccaaaccccaggcgccaaaactgtgcttcaatgatctcgtccagcgggacgtctacgacaaagggatgcataaaccgttgataggaaggagatgctccaaggaatacgaatgctcgctatgcgctgcttaaatctacccgcttggactgtgtgcgagcgtctctataacacactgaattataatgtcatatcgaagagatgcatcctttccggcgggggaactgtagcccccgctcttcgagccagtctgtgactccagggtaagatcccaagctattaagatagagtcgatccggttttgacattgtgctctccaacatatacgagacgtgtcgttgactagaaagcctcgtttgtaagcttcagcaaaattacggtcccagaaaggacactgacaacaggttgtaagccaatccgtaagacgtagccaggtcgacgaaattctgtggaaggtgagcgagagtcagagcagtgacgagaatcggacgaatctcgtcgctggtgctcacctctacggcatgtttcggagtgctcgagtagccggcaaagagagcctgtatgacaatgatgagcgagaattacgaaccccgatcgtttcgtgaccaggaaactcacaggactaggtagaatgaatcaggtcaagatcaacaagcgtactgattaacgcatccagcccaaaggcaacttacttggccaaaagaccccttgcagccatgacgcctcggactcccgttgatcgtctcatatcctccacatcctggtattcccagatgtcaccattaccaacgcatggaacctcccccttggcgcactcgactgcgaatttgatccggggcaacgatactggagctgtcgaaggctgatgtcgagtccggccatggatcgtcaaatgcgtcacattggcgtggatggctggggtaggggagataatgagctacgactgcaaccggaacgtttgctgaggccagactcaccggtctggacgagcctctcggtgagctcgggctgatcgtccaccctgatctttacgctgatggcgaagtcattccccatcctggcatgtacctgtttgaccatatctgctaccagctcgggctgtctgagtagggccgaacctattccttcggaatacgcccaaggttgcgggcagccctaaatgttacgccacgaccgtttagtggctggaaggtcaggatcatctaacaccatcacgtatatgctcacgcaattcagatcgacgccgtcgaccagtcgccgcgggaccgcctgttctcgttcatccacattcctcttcccgacaaactcgccttgcgcctgctcctcctcgttcgcgcctaccccaggcctcacactgatgatctcacaggcatctgccagggatttcccattattggcagcgaattgagcgatgaggttgcccctgacgaggcgatggtcccttgaaggcgggttcagactcgatgggacccgtttgggagaatgaagcggcggtgaacgggtagcggcgcttgaccgtgacgatgatgccatggtcgccatgcccaaacccgagtcgacagggtatccctgatcttctccttggtgctcagatgcggttttcgtccgtctgggtttcatccaaaagaccccacgctcggaactgctagaagtgaaatcgctaatcctcgccgtctgcgctcgcgaaaattccggggcgagcatcatcggggtatgcgtgaccttgagataccgagtaaagtgtcaaagatgggacggagcattttgcaggaaatttgcgagctcacatgcgtctcgtacatcgatacgaggtgtctaaacgggactgtagacggcaggaggctgtcaggactttctgctttgctgcccaccgagctgttcatgcgtgggcttacgcttggagcatcgcacaagaggagctataacgagtgtgactcatttcgatcagattgtagtccgggagtgacgacatgtgtatcgacctacctagcacgttgacctcttccatctcgtcgagcatctcccgtatggtcaggatttctggttcgggaagctcttccgcattgtaatactgagtagtcctcatttttgctgacctcaccaacctatgtaggatttttacagctataccaatcgagaaacggtgtgatacatgtgatctagaagagtgaatccaagcaaaagtggatagtgtaatgtcatgtaaggtcagattgtaactttgcaacttcttgcagttcggacctcggctcagctcgcgtgcatacgctcatcgccgaaaggttcatctcgaaaccatagaaagtagtatataactcttctggaccacgctggatcacactacctacagctagatcagttccactgggcagtgaagatggacctcgccccatctcctcaccctctcgtcgatcccggcccagagatctcgaccggaccgaccgatatcgatgtcgaccgcaccgggctcgctctcgagccaaagaaggtcgttcaacaacctccaggcaagaaacgcaagctcgctcactcccggtctgctacacctggaactgtcaacggggacgagtatgcaggcggagactcatcgagacggtctagcgagaccccggcgtcccaccggtatgctgtcaccggacctgacgaggacgctcggctgaagacggtcgccaagatgggtaccaaggtccctggaagtggagacggtgcagagaggggtgaagaatgcttcttctggacagatctacctatgaacagactaggtaggcttgttcgaatgacgtggacgacacaactaggctcacgctcgcttgctatcgtccaggattccgttacatcgcttgtgcgaatggaccgagatctcacgaatcttctcatccgggcgtgttccccttcttccgacgaacacctcagcattccgcacacaccgacatgcttccttcaccaccagatccttctttcggcctgtccgaaccggccgagcaacctctcatgactgtggacagctcgtctgctagttcaactcgtgaagtaggaggggtgcatctcgactggcaagatcgatccacttttctccgaatgtcaccctcggccatgacatgtaccgccgaaaagggatttcggagcgcaaggacgaatgtcggggtcagggaggggacgtggtactttgagtgtaccatcctcaaagggggtggagaaggagggactggacctgccgtgacgaatcaaggcaggcccgtcgatttcagctcgacgtctcagggggatgcaggtccttctcatgttggcaagaccctgcccaaaggagccggtactgcagatggagctcatgtacggataggctgggcaaggcgggaagcctcactgaacggaccttgcgggctcgatgcgtattcgtacggcatccgagattcttcaggggagaagatcaccatctcccgcccagcaccgtacggcgtcccatttggaacgggagacgtcatcggatgcctgatccacttgccgcccgtggacgagttctccgacatcccggatgttgaggaaagggaacgaaagcgaagggaagccagggatgcccagaacgattcgctggacccggctcgtatcgcgcgtaaacgatatcctctatactacaagggacagcattactttgaaatggtcgaatacccggtagtcaaggagatggagaacctcgtcgcccgggatgggagggttcttgcacccgctatcaaaccgggcacggacgtcaatgctggaatagccgtaccggtcaaggagactaatcgcaatggagtgccggtacaaaagagcatggcgaaagtaggcagtggaaatgggcccatgacgaagaataccgagggcggaaagctgggcaaggcgatcaagaaaggcagaaaaaaggcgggagacgcggacgagcaagcggaggcggaagaccagcccaaaccgctgcccgtactgcaaggctcaagcatcactttttttctgaacggaaagccgatgacgatggagaacaaaccagctttcgaggatatcctgcactttctcccactgaggcagaccgagaaggaggccaaggctcgtcaagcctttgaaaaaggcaccaccaacgacgctttgatgaagcagaaagaaaatccctacgacgatggtacattgggatactacccttttgtgtcttgtttcgggggggccaaggtaaaatttaaccctggacccctttgggagtcacctatcgcagaagaggattggcccacaatccctggcagagattcttttacgctggagggccagagttctcgactcgtgccacgcccgattaacgacagatggcccgagttcagagcggaggagcgcatctttgatgataacgatgacgaaaacgacatgaagaagctcaaaaagttcgaggccgacaagcgcaaagagaggcgagagaacgtttcagggtccggtccagccaggggtggcaagcggaatcgaggcaccaccaagaagggaggaaagaatgctatgagctcgctggtgaccgaaattttcgaccgaagcaccgtgtctggaggatcaagcccttttcctgagccagaggctgatgggtttggtccaggtcacccggattcgaggggttctacgccagctcagacagactatgggatggaccttgatactgcgctgccatcccctgtgccaggcgggcctggctttggtctcgacgtgggcattccaagtcgcttagcatacgagacggatgagagggaatgacttcctggcgagtgttgcccaagccagaccaaatcatgataattgacattacagcatagcggcgactaaatcagaagagcggacgagtccccgtcccggatggcgggacatgaccgtcaggcaatgcgactggtcgttcatctcttagcgcctcggccaaagtgatctgtcgcggacccttaggcataccagtaacgctatcgagactagtacttctggccctcatgggcgatgggtcggactgcagcggacgtcgagccgtttccccagcttccagatcggtcgggaaggcttgtggtcgcactagagcgcttttgcgatttggcctgaaccctttgattttctgcagcgcagcgggagcgctattgaagaagctccgactgacgcgagatttgagtctgcgatctcgacggacttgtgccgaaataagaacgatggcgatgagagccatcaaggctgtgaatgcgattgtggctacacatgacatggcccgtcagtactcgctcgcgacgggaaatggctctgcaataacgtacaacaaacccgccaattccactcgaacccggtttctatcgctaatttcgcgatcttggccggatctaggcccatgttgaccatagcctctcctggcgagacagaagttgccggtttcccgctcgtttccactcctgatgctacaatcaagccggtcggcgaaggttttaccgaggtcgcgctcggcgcagaactgacaaacgcacaagtcggcaatgtgttcgcgaagcctagcatcgccggtacttacgcattcctgatgacagcatagtcaaaatacagagtaccgtttccgtttactagcctgaggctatgagtaaagcccggtgccagatccgttttgcggaatatggacgaatttgtctcgaagcggttcgagaacgaattcccagagccgacctcgtcttcgtcgatcatcacggtgaacagtccagattcagggctccgcacaccaaacaactcgatctcggaccccttgaaggtgatcatgttccaggctctctctgtgcgggtccacctggatagccaaaggacttttgtgagaaaggggttcgaagcgaggcaaaccgtctgcccgtcagactcacgatattgagctattgaagaagttatccaacccatactcctgcatccgctctacttcagtctggttgagcatctcaatttgagtcggtcgaaccatattccaaccgtcactgagttgcagtggatatgtgttccattgcgagtcatctatgaacgcatcggcagtgactgtgacgctatggtcactctctgatcagcctatatgaagccatccttataggatcagctccctcttacagtcttgttaagataactaatgatgcaagaaacctggtatatttgaacatgtttggatcgattttatcgtttcgatacgtaaacattccatgttatggagttcgctcgtctttcgacactcaactatgggcaggcacgattccgcgagcgtataagtataatcgatgcgactcggaacagcctgtgcagctttggtgagagtcgtcgttacgtcagctaaaggcacttttgggtcccttatcgacggaaaggatgtgcgagacccatgcggcgcgaatgagcgcaaggccggtacgactcgtaccttcatcaggctcacgtccagcgacgaaccctattacaacaaaggatacataaaggtatgcgatcgaccggatcagtttcggcttgtagaacaaaggctggcaggggcgcgtgatgcgcggcaggatgcttgcgagacagtgcgagttgctattaccaatacgagagtgccatcatatttgcaatgaagtgagtatcttcagttacggtattggatgtcccgttggatcatttctcaagtggcgtgaggctggtcttaccttgatattgggtgagccctcagtccgtttcggcgatcatcgaaagtccgtctcgttgcttctcgtcgacaagagtaaccgcagttgacgctagaccctccgacgttgaaagccattgacgactgatacaatccccattatcgaagactttgtatagactggaggaccacggctaggtagggagactaaagtcgtccagaacagaagaaagcattttgcgttcaagtttacaggagaccggtcgcaccgatgatccggcagatttttcgaagatctgtgcgaatagctgatctttcaaccttcaagacatgtatttggggtcgtgggtagagactggacagacgtccaacttgagaaaatgagggattatttgacaggtagatacacggatcgactgaacttcgctgcgactatccggctttgagtctagacatgtatcgatttgatcgctccagcacagcattcagtgcgtcccccgcctcgaaccgctgctttttagcgccccatgcgaacgctcccgaacgactatctgattctgatgcaccccctgagaatgcattcccctcctatattgatgaatgtacgctttcacttgacctctgcttcacccaagcttgaggccaagtgctacagcgataatgacaaagcataccagcctcagtgccttgtccttgtgctgcagagcagcaataagtaaaagagacgagcgatatagaagacgatagcaagcttgcagtatcccgtccaccattccttcaagcgggagctggcctatcccgacctgggataatcccacgccaagaagcgaattgcctggttcgagctatgcactcaagctcgacatcgcatcaaagatatcccctaaccatattcacggtgtgtttggggctggacaaggcacagtggggttccatccggttaaaaatctggcctggacgtcaatccaggaaaactacctgcatgggccggactacgtcactgtttttgtgttcagccttattctgccagggtagccaggttgacaacgacttgtggcagatggctcgagttattgaaagggcccagttaagtccgatccgatgtaggctgcggatcaagatgaccgcagacaaggcccaacattctgctggactcgatttgcagcttttaaacatcttagggctcaaatctgcaaagactgttctccggtgcggcatacccgttgctatcaatcatcggtcaagaggcatgattcaatgcacagtgcggcactgccatgcagcctttagatagcgtttgaaagatcatgagggcgtgcctcgcccccccccctacccgggagcagcagcgagggggagggcaggaaggcaggccgaggggagtgcaaggggaagggccatggcgagagaggaaggaaggagatggaattaaattccgacaagccgtcagccatcgtctcgcgtgttcaccccctttacgttacacttccggaaccaaataatcgcgacccccgaccgaggacccgtgaattgattgtcagggttcgaggtcatcacagctcatatccacgggccaacagcatcactcatcactcaccatcacccccatccttcatcacctcgggctcacacacgattcaaattgttcgttcgtacgcctgggaagaatagctagcttctgccttccgccattcctcgctccaggtcgtcgagcctatcatgtcgatcccccacctccggccctcaccgtccttgttgtctctgcacgacgctcaacaatctcatcgccattccccgcatcatcatccccatcatcaccaccatggctttccatcgacaccttcccccgatgcagcctataccgctctcccaaaaatattcttctacagttcgaccctgctcgcactcaaccactctcagcacgtagggatcgacgtgatcgtgctcgtaggcggggtatgggtcgtagctgcctttggtgtcgtgcggcggacgaacggtagactggccgaggatttagaagtaggtcaacttggggagtctcctgcagctcggacacggtacgacgtcagggatttgctgcggaaagctgatcatatcgctcgaatcaacgtcttcttggtgaccagctatcgcgagcgctcgcattggcgatcacgttcgtcatccaatcgatttgcatcatcacgacaacgaggcattacgatgctctccggtgagtcgcacattccactctctcgaaagatcatcagaggatacaaccgctatcaggagactgattccgaatcgatccgccttcatacctgtctcaggtgcgcggtgaccgtgctcggcgtgctggcggctagcgagatctctcaggtcagcctcgcgacgttgcttcacccatcccttggcgaacttttcgagctgatcggaggacgaacctttgccgcttgacttgatgttgggatgtcgtaggagtacggatggatggccgggatcgcgacgtcgtgttactacctgctcgagagcgcctggcagggcaaacgtgcgtcccgatcagatatgccggcttgccgcgaggaagcaacgactgacctcgacctgcaccgggctccttcctcggttccttgcagccatcttctccgcggccatgttgaccgtctcgttgggtctggctctggtcttccctttggcttgggaacgggaactggacgtcaaggaaaagagctcgaggagggggatgcaagaggtcgatctgggcatctgtggagcggcagggtcagtcctcgtggcactcggtttgacagggttgggacttttggtgagtaccagtagcgagtcggggtgcgagggaccgtccgtatgaggctgacaaattagaccttgtatgcgctcatagtcacccgctcggatacacgtacaccatcacgtcttgcactcgcccatcaccctatgtctcatctcgctactcgtcgggggttgcatcgctctcgacgcttctcgccgttccacccgggatcaaggatcaaccctgaacccgatcattccgaacctccggttttcctccccgctcgtttcgtcggtgacagcttcaaaaaagacagcaagtacgagtccgggcgtatggttggagaataagaaacgggcggatcggtcgaggaagacgtacgtcgggagggcgttgggagtcatggtagcggggatcttgttgaacgaggagacgccgagctggggtgatggcgctgtcgctgtgacaatctacgcaggtcagtcctccggatgtgcgtcagtcgtctcgctggaaggccagtcgactcatcgtacaacctttttcacctcttgtgcaggactgagattggcagcgcctcggataaatctagaactcaactcgcacgaccacgccaaggaggagaagcggactaccaacggttacgtcgctgaggcttatcaacccacaccgacgttgacgaaaccgagcgagaacccttacccctttctcgtcgactatctgccccaatccgtccgacccgtcctgaagtccatcctctcctcgccggaatcccggcccatcttttactttcttctgctcaacctcgtctacctctttgtgcaactcgcttggggagcgtggtcaaattcgttgggcttgatcagcgatgccgtacatatggcgtttgattgcgcggcgctcggggtcggactcgccgcgagcgtcatggcgaggtgggaaaagggaggccggtggacgtatgggtgagtgttgtcgggcagtaccacacgatacaggcctcaagctgagagtccggctcgtcgacagttacgatcgaattcagacattgtcggggttcgccaatggggtctttctcatcctgatctcgatctttatcctgttcgagggcgtccaacggatgtgagcaggagcctttccaggcggtaagacgatgcgcatcattctgctgataacgttgacctttcccgaatagcatgaatccgcccgagatgcagcagttttcacaactgttggtcgtcagttctggtgggctggcgatcaacctttggggaatgtacgctactggccatcatcatcacgggcattcggtaggtggattccatggcgagttccgcccaaaccaccgtattcctgacatgggattattctacagcacggcggtggcgactgcggtcacggacatggcaactctgccaatatgcgtggggtctttctcgtgagtgcaaattaggctcttactttcgaaagggagggcactcatcctttccgtctcaccccgactctcaagcacgtcttggcggtgagttcctccactgcctgttcatcgtcaaaggcgaactgacccacgtgaacctccgataggacacgctcggaagcgtgggcgtcatcgtttcgaccttgttgatcaagtatactggttacaccgtattcgaccccatcgcgtcgctatttatcgcgggtctcatcgttgcaagcgtgatcccgctcgtcgtcgatagcggccggatcttgtgcctcgaactaagcccagaaaaggcgaccgagattcgacaagcgcttggagaggtatccaatctggaaggagtcgcttcctatggcgcggctcggttctggcccttggatgaggtcgctctgataggcgccatacatatccagctcgacgtatcgcgcaacgcttacgacccgtctagaccggtggacgcgttttcgacgacggcttttctggatggagcaagggagaatgttatttacgccgacgctgaaaaggtccggaaacgtgtggacaaggcgctccgtgggcgcatcagtggtcttacagaattgagcatccaagtggaaggcatggcaccgaattattgctcgtgtacgacatagaactggacctaacatggggctccttacagggcgaatagcatattatcattatagacacgggttgtatcactatagcatcggcatcttgtgctgtatccatatatcgcataattgaggttcagcagggcgatcacggttgttgcggtggaggtggccggtctgcatggctgcgccagctatccgatcgaaatcctgtcgaaccgttcgggtggacatccgtttgaccctgattctgatccggccggaaagcgtactgcgggcccatgtgctgcggtcgagcctgaaaccggtagcctgcttggggcggcccttggaagttcgggccggacatctgaattccagcttcgggtcctggtcgaaaagctggtctaaagcctgagctttgaccccgacccctccaagatcctcgccctggccccccgctcgaaggtggtggcagattcctgctccagaggacctccttgccttcgtcactccagccgtccggactcgtctccaggtcgtaaaggatttgttcgacgagatcccccgtccagatcccgtcgagcggctgtctttcaaatggcagcacgtacacgcgcttgaaaccctcggggatgtccctagctggaggcttgtatgatgagaacatgatgcccaagatcttcatcgcgtgctgtgcgtccgttattgtgggatggtccgtccgtcgtttcaagcgatcttccaaggcctattagcttggtcagtcaggaatgaccatccgatttgagttggcgaagtacttacagcacgaggggcatccactgtcaccaagattcagcttcgaccggaacgccataaacttggagctagcactcacgtatcaagcaaaaggtgtccacgttgccaaattctttcgcaatgttcagaaagtgcacacgctgtctaaagaaacgagactagtcgtgagctcacgggtcgaaaccgtctcgttcgcatttgtttcttactgggggtcaaagtctacccgatccaccacgacgtctttgcccgattgaagcccctggcgaaccattgcttcacattcttgtctcctgcgggtcggcgcatcgtcctgtgaggctcgcacccattgtccggtcttgatcattgcttcggccagagtcgttttccccgagccgatgataccgacgaggatcagcaggcgctgtcgtctaggcggtgtgctaccggcgagagtttctgtggacatttcgatgagatccgattcagcagcttctactcgtagtagtactatcctgtagctttcagcccggtgagaatggtgagtataagtcttgtttgacatttggtagggcgttgatgttgaccggtgatctcgttctgcatgtcacctgatctggattcgcgcatcaacaacggtcagggccggtccccggttctggtcatcctaaagttaccctctcctctcccaacatctacatcccaggaccgtcagcatctctagatctctatagaactgtactgacactcccacaattcgtacaacatgtcgcaagcaccttcgagctctagcacgacaaagcctagtctgacggacacagcttcaggctcgctcatgccgccgacgaacggaacatcacagccacatacctctgtaggcggcacgaccacctcggataaggtgaaagagaagggaaaggagaaggaaacgcaagacaagccacctgccaatgtctttaaagtgagtttgaatttccatgattcggtagactgatgcagctccccgcccatctgcgttctcgagatccgtacgtcgagtcgacatgtgccttgtgaccggtgttaatccttgacgagcgtcgttcctcttcgaatgacagaatgatgggagcttcttggctaggttccagaaacccaaggtatggggtgaaacacaaggctccgcaacggactcaggctgagaccattatggctcattgcaggaaacctctgccgaagacaagaaggctgccgcggtagcacagaagaaggcattcgaagatcgctttgtgagtggaggatgcgaggtcgatgccaaacatctatactgaaagatcggtgtggaaccagaaaaagcggggcaagagacctctaccccctgcggaggatgaccaggccaacaagaaaccaaagaaagagttgtgtgagtcctcgatgggttccggagctggacgatcggactgatcgagcgaaatcattgcagccgcctacgagaaagaagtggccaagtacgagtctaggatgctgaaagataccggttcgggagttcgggccatcatgaaatgagtcggttcgctttgtacgactttcgtagaccactgacgatatgctttcatgcgaatatgcaaacatgaatgtgtagcaaagaagcgaatattttggcttactgatttggcttactggtgctatagttgtagcctgagcttgctattcgacaatgcattgcgttggaaaggcaaacgcgaattgtgcttgtgaacaactaaacaaatagcaattacacctttctactcgtacagaggccgtgggtgctttgcgaactcgtcgagtctgcggccgatcccatgcaagaccgatcacctacatatgcgcgctcatagagccgaacgtcgagcccagatgctaggtcgatcaccatcgcgatggctgcagcggtgcaacatcctacctcgtgggggatgtccttacggtgacgtgcacggctcagtcatatatccctgttcatctccctctcctttgatcttctgccttgtcccggaggatcttggcattcattaacgccaatttctctgatggtcgtcgaccatgcaacggctggcgaggagaggacggatacatcattgtaatcgatcttgaacgccttgtcctctcgtctttttctcccgagtgggccaatgtaaatttcttttcgttggtcggcgaccttgacgcagaacgtgcgaaactcgttttgaagggagggacccgaaggttattcaagggcaaaatcgataacgtggcacgtctctgtactttctcatctctgcatgttttgcaaacgtcgatgaggtagaaaagatgacgccccacacatgaacacgaaacttttggaacgttcggttttcacatgctcgacaaggtcataggggagatttctgtgctcgtcctcgggcgcgagaaggttgagagaaagaccggacggcagtgcattggactctggaaggttcgcgaacctcgaagatcacagacgtcatacgcgctgacagtctggtattgctgcacaacccgacatggataaactacaatccttccattccccgtcacgcgacattgagaagttccgtagaatttgcaatcgagaaagcgtctcatgatgaaacacgcgatgcccgatccgccctttctccgcttctggccgagcgcaaagatagaaaaggggacatgataaggtttaagcaatcgaaaggagtctcgtcatgatctgcaagatgtccgatccggtcgagacatagtggcgtccttccattctagaaaggcagatggaaggcttggcaatcgggatgacccctattcgatcggtcaaaggatgtctgtcatttcagggaaacataagaaacgttccacgtccgagaatgatttcgattctacttcacctatagtgctgttgtacgaccgtctcgttgctcgcatctgataagagtcacctcggcctcggcctccacattggaattgtgctgcgagcctttcgattactgatcaccggcccgcagatcctgatggtcatcataaaccttgtttttcgcccttttctcgcagtgtgatcgaaacgcgcgcgtttcatgaatggccgaggtctggctatcccgcgggacgccgggtgctggagaagggccggaagggaggagccagggcggctgccggaatcccggcatcgctatgggcggatcggcgtgaccatgtgtgatcaagtgtaacgtggatgattgcaaacatcctgcaaagcggtacagcaagaacagaccccctaagtcggcggaagtggatttgcagacctctacgtttgatctgcaaacagaatatgcagatcgttgcagacgttgatcctttcgccatatggagcatttgtttacctgtcgggtgagcgggtagacgtccaagcagtgatgacgcagagtgttggcacgttggtcggccccgcacatggatatatagctgtatcaacttgaacgggctcccgaaggacttttcaggatccgtcttcccattttcgtatcctatcagcgtattctagccttccgcgtggtaaaattcgacatcatggttccctacatcaacgacccgaatcagactcccattcgaaacaatctttatggccttcctttcacctcggtcgctcttcccccgctgccgcgccatgctcccgacgcgccttctgtgcagcccttggcgattccttcttcatcgcgcgctttgcccccacttcgggacaacttttacccagctcgttccctgccatcatttgatgaagagtatggcaacacaccagactccaaaagtcaaactcaacgagtggtcccttacgaaccttacaaaggcggtcgtcaagggagagctccttcacccgagactcccgtcgctggacgatcttcacgtgatgccgcagtggcccgcgtttcatcgagagcgatgtcagcgcaaaggtcatcaggtggtcgatggtgagtagaatcaacattgatcggctttgtctgggaattggcttaggcttatcccgccatagtgatgccgcaccttttcatagtgaaacctggaatgaagagggtcatgggcctcactttcgtgaggagacgcccgctctgatgcctgacgagggtgacgagtcggactgctccgatcatttcgacgatccacctcgttcgaagcgctccaatggatctcttcgttcgtcgacttaccgacacgatagacgcagaagagcaccttatgaagcccgacgtccttcgcgttatgccatctcgccggctatgagtagcgcctacggttactctccggccatcgggggacaaagtccttggagtccgttcgtgcccgctttccagcaaatgtcactgtctccagcttcaccagctatgccattcatgtatggaccggtagctcacccggatcccaacttgtcaggagacgtggcgtacgttgcgtattttacggcgccgcgaatgggatcgtacccagggatgccagtccccaggcctatccgaactagatcctttggcaacggctctgaacgatcggtatctacccgagaatctcgacctcactcccgacatcctgaaacctcacgaatcaaggcggagagagagcaccgatcccgacggccgagagctaacaccctccttcacgaaaggtcttctaccgaactgcgggatgaagatgatgttcatggctcccgggcagcgcaatctcttcccgataacatgttttgggatcagccttctgggaatgaagccaatttcgccgaaacgacggagctgccgacaccggcggataaccaaagggaaatattcaatcatgtggacaattcccagcctgccgcgatcaaacgtgaatctagcgccgctcactattgtcctgggtacgtctgggacgtcctggccccagcagacatcgtagcaaagtataagaataataaggaggtacagaaaggcaccaaataccaacgaccagccgggaattacgctgatctcatcggccgggctctactcgagtcggctcctccccatcaactggacgtcgctcgaattttcaaagccatcgccgcgaagcatgctcatttcacgctagaccctcgtcttttgtacaacgggatccggcactctatcaacaacaacgtcgcctttaccagggtacagcgaccgcatagagagccgcacgctcaagcgaatcattggcgcgtgactccggggtacgagtactggttcgaagaaggggcacagagaccgagagccgagccgcaaccgcgccgaacggcaagcgagtccagttcgatcggtccttttcacatcgaaatggatgactcgccggagattccgctcaggtcgttgttcgaggtgaacagacgtgagagggcgagaacacccgaagcgtcgaacgtcaacatggacgtggatcgcacacccgtggatcccaccatcaacagaactcccctggctagaagtgcagaacgtcctccacggctagatatgcaagcgatccgttcgcactcgatcatgtctgggttcagcgcgtctgcagtcacccagggcgacaatacgccagccctttcgttcgacgatggtagcagcgcgcgcccatcgccattctctttcatggatctatcagctttcagcatcccgcatgaggccactcggaacggtggccaagggatggccagtcccaacacgagcctaggcttcccttcatccagcttcaacgtctcttcggccttcttgtctcagcaaaacagtcggaagcctctggcggataagacgaatcagcaggatccggcagggccatcagcactcggcttctcccccttcgcaaaatttagctcgcacggcggaggtttcaatctgggatacgaccagtctcccgatatcgtttcccagctaccccaggctcttgccggcccgggtctgcacaaacccgtttccgttcggtccttgtcggccttgtcgacgactcgacccggatctgctacgacatccgtatctagcaattcggtcagctccctggcttccgccatggatttctctcttgttcgaagtcggcatgcctagccccttttcgcctttttcgactttcgctcgaaggtttcttggctcatcgcattcgtttgtatatttttgttcgccggtcgagctgtgtttcctgtttcaatttcttggatgacgtgatgataagatttgcatcataagttgccctcgagccccgctgttccgttacttcgtcatcgtggtataacctgtcctgttgctgatacaacaccgtcgtgaccatctcggccatatacaaacctcgttttttcctttcactttctaatgcaagaaccccctgatggctccaccgactccctgcacgtccagcaagaacgtgtcgtgaccccagacgcctcccagctcgtaatagctgaccttttcgttcccggccaatttgagagcgtcggcgagttctcgttgctgttcgactgggaagaggacgtcggactgcacgccaagaatgagggccgggatgttctggagacgtgcgagaccttttgcgagcgaggcgagatgaggggatttcgaagtcgggatgaagggtgcggcgtattttttcttgtgcttctcagtctgactcgagatgggcccgatgacgctcgaggatgagatgttatcgtttagctccgggctgacgttatcggcagggtgtggaaagggagatggatcgttggggtaggccgacttgaacttgtccgagagcgcggcgaggatatcgtcggtcatgtcaaacaggtccatcgccttggacaggtagatcatcgaattggcgtcatacgtcaggcaaaatctttctccctgcaatcaagcacggctgcgttcgatactctggctgcacccgcgagaagacactcgtcaggactcacctgatgatcgagatacgtctcgatcaaaaagtctggactgagactaggcacgccaacgaccttttgcccatcctcgtccactgtctcactgagcattttcctcccgaaccgttgctcccactcgggtcctgatcggtacgtgatcgtggcaatctctacgcaagcgaacaaggggaactgtgtgtaagcggaaaggcgcgatggacccaagacctggacgcttacgtcgagcgagtttcataccggcgtggggtggcacgccgtcatagtaaaaccctcgattccaattgggatccgacatcagtactgtaggtcagatacgatacgtcagcaacgcccatcctcgtctggacgaccttcggggcgtgacccggactcaccgctcctctgtgcaaacctcatcccgaccccacctaacccgctccttcccgtcgcgctgatggaagccaccctgcccaccctctcgggttcgaggtaagccaaggccagactctgcatcccgcccatcgagcttccgatactcgcgtacagtcggtcgatccccagtccgtccaagagggacaattgggcgcggaccatgtcgaataacgagagtgtggggaacctcgtcgcccaccgttccccttcctccccgtgcggccattgggaggacggtcccgtggaaccgaaacaccctccgatagtattcgtacagatgacaaagaacctgtcggtatcgatggccttgccgctccctacgaaatcctcccaccaaccttttctcgaagcgacgtcttcgctcacgccgttaccccccgaggcgacgtgggacgacgccgagagaccggtgtgcaggagaatggcgttggaacgatcggcgttgaggttgccccaggtctcgtaggcgatcgtatagtttggcaaggggttgggagagtagatgaggggaagcggggacgagtggtggtacgtcaaggtggacggtggtggctacaagtcgcgggacgcgaaaggacattgagcaaagccgaacgagacggcaccgacccgagcgaatcgatttccgtcgaggcactcacgacgtaacaagcctcggcctcgttcccatcgaccgcgtttttttcaccttgatccatcctcctcacctcgctacccttgaccccgatgacctctcccccggcggttcccgacccggaagcggtagacaaccggacgttccctcctgtccccgtgccgaggacctgaacgtcccgatcgtgtcgagtgaaatcggacgtattaggccgaggctggacgggcaagtctgggctcgcgggctcctcccccgctgctcccgtatcggcgtgaactccaccggtccctcgagcgacgatccttgatcgctggagctgtttccctagcgtcgacgaggtggaagctgattggggtttcctcccgtaatccccgctcaagccgaacccggccgcctgatagttgggtcgtcgccgaggtggaagcttgggcgcgataggggcgagatgctcgtggtgcagcctcgggtcgtggtcctgatcgtacttgatctggtgtttcgtatcgtcgtgctcgtgcgtccgactcgtatccaagagggactcggggctgggtttcgtcggccattcagtgggccggctcgatttcgtagaataagggtgggatgaggtagatgaaggcgaggtcgagtacctgggaacgccttgaagggcttctggtcggaggtgaggtttcggttggaacgggctaggaatggagtcatcgaggcgaattgaagagcaagagatggagcggatgtttaggaagagctcgttcggtacgaaatgcaagggtcgtaagccagtgctcgttcgagctcgttgcaagatcgtccgggcggtcatgttgcgtccggagaggtttcgttcgggtcgggttctgttgtgagtgccgtagtgggctatcgtcgttacggttgtgctctcttaatataaacgttgcaacgatgccgacgacgacgacgtagcgatgacgagatggcgatcgagttgaagatgatgatagtcatcttgcatatctatccatctgtgtgtctttgctttgcatgcgacgaaaccgaggtcgaaggtcgacaattcggtataatttgcttccgaagcgcgatggcgacatccaaaagatggaggtctgggaatccggatgcaaataaatgatgagtaatgataatgaatatacggaagtaaatgacatagtgtaggtaaatacttccggtaagcccccttttcttggctgtgatcacgtgatcatgaatcatcgttggacctccacttctcatcaactcacgtccccgccctgcccatcgaccactagacaccattactactgggtcatcatcaaatacgctcatcgaaaaagacgactataagctcaacttgaactttcatccacacgctcactacgtctcccgagttgaaaaatgctcgccactcgtcttctgagacccctgacgctccctcgagccgggccgtccaacctggtccgttcgttgcacgcctcgacatccaggctcgacctcgaccgatcgtccacagcagccccgccccgtggagaagacatcccggccaggctgattgggacgcgggaagagatcgagaggaagaaacagtcggctcgggacaagtacaaggagcagctcgagaagcggatgaaagagtgagtcctggatcgcgacgagctacgagtcggttcgctcactgatgcaagacatccatttacagagaaaaggtctcgtcgctcgaggaattacgagccaggattgccctcgcaaagcagtccacgcctgaatctagctcgggatcgaacgttttgaatactgaccctcgatctcgagatggctcgacgacgacaacaactgcctcgaccccgccggccggatcaggggtgacggatgagaaacgaaagcaagccaaggcgactgacgctcaggtcaacaacgatcgagccgggatcaaggtgagctacgaggttctgtgcgacaccaatctcaaacccgctatgggccgttgaccgctgacgtcctccttgccgttcccatgcccagccattgtcacaaatcctaaacctcccgctgatctactcgtccccgcatacgacctctcaaatctcttcactctggcaagcctaccattccgcgcatccgaccctgtcaccgacgttcctctctgcctcgattcccccgtcgacgtatgcgagcatggtccagctcgccaagcaacacccagtcttcctcctccccctgcccagggagaccgaggcgggcaaggtcggtggcaaggaagcttcgtgggagatgtttttcctccaatggacgttccaccctactccctcgatgcagaacaaggatctggacgttggcgtcggtgcaggttcaagtcgacaggtggagaggttgccagcgtcgagcgtcatgttcacctcgctggaggagtacaagcaaaagggagaatgggctcgaccctggttagtcctcacgcactacccggacctacacaacaacccgctgggtcatcctgcacccccggcgccagcgccgagtaccacgcctcctcccacagctttacccgcgcgctccatgaacgccagtccgagtccatacgtgtttgtcgcctcgatgacgatcgcatcgacgccatccgccgggaagtcgacgtcgtcgaccgagcgtttcccttcgagcgcgagcatcccgccgaacaagttcctcgccgcgtcctcgaccgttttgcccaacgagacccactcgacgtcccaatcccctccggtcgtctgctggatcttgcgtctgaggccgctattctcgaaagccatgaccccgagcctagccttcccgtcatgcttgccggcgacccgctcaacgatcctctgcaagacgctctgcacgtcctctgcgcgttcgacctcgtcatctccgctgtcgacatcggcgtgatcgcccgaccgagcgctcttcccggacggcgccttgtttatgaacaagaccgttcgagaaccagcgtcctgcgagggcgaatcgaccgtcatcgtccgggtcgtccgggtcgtcgtgaaagcgtccgaggggtacaacaagtagaccggaatgctcggtgaataatgcttgtacttcatgcccggtgtagaggggttcgagatctctccttgttgttcctcctccttgatcgtcttgatcggtttcggggtgaccggtctgtcgctactcgtgctctcttctccactcgtagggttcgtggggatgggcgcgtccctcccatacacccatacggtagtcttggtacccaactcgacgtcgacacggtgtacggccttttcgagctgttccacaccgacgcctcccggtctgaggatcttgatcacgccaccgccggatgtctcgctccagtcggtcccatcgacgactgtgctctcgactccgacggtacatggtcccgcatcgaggatacaaccgaggacaccctgttggtcctccccgtccatatttccatcttcgtgttgctgttcatccggctgagcgcctttgattcccaggtcagcaaaaacgtgcctagcctcggtcggactcggtctcccgctcgaattggcactaggagccgagattggcaagtctgacagggcgatcaaggctctcgccaggggatgagctgggaacctgaccgctaccgtctgtggagctggggctggtgggggttccttgttggggaagaggagcgtcaacggtcccggccagaaatcggtgatgagtctcgagtagacattcgggatttcgtaatcggtcggagtgagacgttggagcatttccaagctggatacgtgcacgatcaacgggttatccgagggtcgacctttgagcgcgtagactctacggcaggcttgtggggacgtggtggatgcgcccaggccgtacaccgtctcggtcgggatggcgaccaatctcgaggcgtggaggtgagaagatgctgtctggaggtgagacagggtgtccttggggatgagcgaggtgtcgagacgaggtgattggagcggatgttgaggtggttcggaagactgaaagacgagcgagtccgggctggaagagcatggcaagaccgggaccgtcttgacccgagacttgagcgggctaggtcgatgactggcactcagtaagactggtcactaaaccccgcacgttgactaccccgtactgacctcttggccgacatggtcgtcctggcggtgtatgtcgacctgtttgtccacaacgacgaggtttgtcttgcttctgttctcgagccgggtgagctcgataataacgcgatttgattcgtttgacaggctaatttcgaaaactttcttctgggtatcatgagctgatgaccgtagagtcacagctgccttgattatgcctttaacctgttcaatagcggccaacatcgattgaccatgtccccaagtacacaccgagtgactttcaacttttgaattctcgaaattcgcggaagcaaatttgaaatattttagtgaagcaaccagcaacaaggtgaccaaaagttagcaaagtacggtaacaaacgtcgattcaagttgggatacaatcgattacccgtcaatacagtgcagcaagacctcccgcctgtcatcgtagttgcagccaggccgacctccatatccattgcccgaagaaacccgcctcgaaacgagcaaatctagccactcgtcgaacgacctacatctagcactctgactcgaccatgaccaagttcatcctcgtcgccggtggtgtcatctcgtacgtgtcgctctcactcgtcgtagtacatctcacatgctcaccatatgcacatctttcatatctctaggggtattggaaagggagtcatcggcaagtcacgaccctgcaactttccgcacacatcgtttcgatgctgagtctcaccccctcctcgccctatacaccccactttacagcctcctcgacgggtctcttgctcaagaccaccggtctcagcgtgactgccatcaagatcgatccttatatgaacatcgatgccggtacgatggcgcctaccgagcacggcgaggtgtacgtcctcaacgacggtggagaggccgatttggatttgggaaattacgagaggtacttggacgtcaccctcggcaaggataacaatattaccactggaaaagtctacagccacgtcattgagcgagaggtgagtttgcccgttctttcaggttgtacctagattccgagctgatgtaccttcctgtgaccgacctttccctccatgtagcgcaagggagactacctcggcaagaccgtccaagtcatcccccatctgaccaacgccatccaagaatggatcctccgcgtcgccgccatccctgtcgactcgagcggcaaggcgcctgacgtgtgtatcgtcgaactcgggggtaccgtcggggatatcgaatcggctccctttatcgaagccatgaggcagtttcaattcagggtcggcgtcgagaatttcgcgttgatctatgtcagtctgatccccgtcgtcgggggcgagcaaaagaccaagcctacccaggccggtgtcagggatctgcgtggattgggtctcttgcccgatatcgtgagtgtcgtagttgtcctcgtctcgcagcccccccgttcaccgatggatcgcccatcttcttgcactccccctttcccccgcacagatcgcctgtcgatgcgagcacgagctactccccgctaccatggaaaaggtctcgatgttctgccacgtccagccttcccaagtcctcggggtccacaacgtcaactcgacctatcacgtccccctattgatgcgtaaccaagggttggtcgactttctcaccaagcgactcaagctgaacgagatcaaggtcggagacaaggacgtcaagcgaggagaaaacttgttgaccaggtggaaggagatgacgctcgagtgagtcgtcaccgagaccgctttctcaaaaaacggatcgctcggctgacctcggacctgatggaatgactcagcgccgaacgtcgattcgacaccgtctcgatcgtcctcgtcggtaaatacgtcaccctccaagactcgtacatgtccgtcgtcaaggcgctcgaacacgcctcgatgcgttgcgggaaaaagcttgagctccagtgggtcgactcgtccaacctcgaacccgaggccgagaccgccgacccggtcaagtatcacgacgcctggagggcagtgtgcagtgccaaggggatcatcgtccccggtggattcggtcatcgagggaccgagggtatgatcgctgctgtcaggtgggcccgagagaagaaggtccccttcctcgggatctgtctcggtttccagatcgccgtcgtcgaatgggccaggaacgtctgcggattcgacggcgcccattctgccgagctcgtccccgaaacccctcacccggtcatcgtctttatgcccgaaatttcaaagacccatctgggagggaccatgcgactcgggttgcgaccgaccctgttcgagtcgggtaccgagaagagcaagttgaggcgtctgtatggaggagaagagactatctgggagcgacacaggcataggtacgaggtcggacccgcatacgtcgaaaagctcgaacaacccggtgggatgcgtttcatcggcaaggacgagcgtggcgagaggatgcaggtcttggagttggacggtgagtcttttgtcgcatctttatccccacaatcatcgcgctgaagcctcgtcgtgcgtgttccccccgcgttcacagaccacccttactttgtcggtctccaggctcaccccgagttctgcactcgacctttgaacccctcgcctcccttcctcggactgatcgccgccgcgtgtggcatgaccgagctcgagacccagatggcccgtaacgccaaagagtaccgagatcctcacccggacgagtccaaggtcattcccgcccgagaacccgcttcggaactcggtcagggcaagcctcaggaggtacgcgacatcaaagtcgacggtcagtagacgtccgccgatgaggagagacgcagtggggagagatttagattgtatattactgtatttgggagacacgacattgacatgacgaggcgcaaggtgtttgtgcgagccatcgatcggtagctcggaagtgacaatgtcgagacgggtcggtgtccctctcctcaagccctggcaccctaccgacctttcgcgtagacatcggagatgatcatatcgcacatcatagaatttagccgtggggcaattctgcgagctgatgttgtaggttgacgctgggtgttgccaagtaagctttgccgtagaagaaatctacccattcgacagtgcgatacggttcccgggtcagcatgagaccggtcgcgcgtgcgtgaagagtatcctgtggttgttcttgacgcacgaggttctgcgcccagtcctggcattgcatgaagtgtaatagtaatgcgatgcaaatccactcaacaggtctttggctatacaacggcttttgtttcagttcatgtgttccttcatcatttcgtcgtcgtaaatatcgttaaacggccatgtcgtcactgtcgctattataagcgacgggctcctcgtcatcacagacgaaagatccttcataatccgagcttggaccttgctgagtgtcttcctgactgagcaggatgggtcgcctcgccttggaaatgaaatcgttatgtcggttgctacggtccgcaaaggccggaccaccttgaggagcttgcgtagacagtccggcgaggtaggcgcgacgttgattgtagcctttcggagcttgcgtcggctcgaaatgtccggcaaatctccggtcagattcgctctcctcgtcagaaatgtcttcctcgtcatcgtcccggtcatcgccgctgacatctacatcatcttccacaaacatgttgcgagcacgggctctgtctcgacgtcgggcaggtgctgggattggcgagctggcccgctggcccgtgcgagggatcaggctggccgggctgaatccttgtggctcagtaccgactggcgtatcaggttccgaagagggtactatcaggatcctgttggcacctcgccgtcgcacaatgaccggcgaggcatctgaagtaggcgcttctgccgtggcactgactcgtgccgagcttttctgtatgctcgtgggaggacccatagccccgtgtgctggtgtggccttgaatgtcggaggtttgaaaggttttgcgaggatctgagctccgggtatttgtggttgaaattcgtcgtcatccaggtcgagcatccatcggtcatcgagctgactaaactcggaatgcttcgactggcctgtggcgggtgtcggtaaagcttgcgtgtgggcagttgtgccattcgtcggtcgtaagggcgtcgtgttcatgtcattgtagttcgtggaagaggggtcatgggattccaaactcggaggagaatttgcagacggcaaggatgggccaccaaagacgctttcgaaaaaggcgtccttttctggttcgttcgaggcgtcttcttctgaatctgatgaagcaaagttcttgtagtttgaggtcgtcgatcgtttcgtcgcgctctgtcggggtgcgagggcggttggagtttttttcgttgctttccgcttcttcggaggcggtgtgctagcatcgctgtcagacaagtctgcctttttggcaatgacatcgcgaagatctggaagatcttcatccatgtccgtctcctcttcggacgtaacttggcgtttcttgcgtccgcgcgctgtcactctctttccgtttgtggtaagggagcttgccttcatgaaaccggtaataccttcaggaatcggaacgccgcgctgacgtggtgacgctttggggattgtcgatttggttttacgcttgtttcctcgattcttcacttcatcctcccaaggatccaccttcatttccttaagaacgggttcgggcatcttgtccaacaaaggtggcgcatcgtcgtacagctcgagattgttaccgataatgatctctgattggatgtctctatggttgaagatggccgcgtcccaattccggtcttctcgtccgacagtggctaggacgtgaatgtgaccgtcacgctttcgaccggcccgtccgatacgttgtagctgtggcgcgtatgatacgctgtcagttcgcgatccccctcaatcctcttgtgatcaacgaatgtgacctactgctttgatggatgtcctgggacagttgtaaatgacgatgaaatcgacttctccgatatccaaaccttcctcgccgatacttgtagcgacaagacaattgtactcgttcttcttgaacttttcgattacctgcgtcgttccaagtcagccaaaaggaacgactcgtccgggtctacgctgctacgcacagatttctgctccgcctgcgtaagtcccttgtccttgacgtcttttccttgggatcgtcccacgaacttgtgagcccggatgagggggtgcttgttgagcatttcctgtaggtcataaattgatatcagaagcgggtcgcggataaagtgcagcacattttgaactcaccaccaactcgttcacgccctctctaaagctgcagaagatcatgcagcgagtcacgctattctctccaccctggctgcccatccgtttagcctccaggtgagcgttcaactgcgagtgggcgggcaagcgggaggtcaggcatgtgctttttttgaaaatgaccctcagaccgctctacgtaccaagtccgagacccgtgcgaactttggatgcatttctccactgtcgatcaagtcttgcgtgttctgatagagctccctccagactttgctgctttgcaatcggttcgattttttgctcgttttccccttgccacctgattgctcagacccgttgatgtctttgagcacggtgaagaacattccgaggctgtactccatctacatttcgtagtcagcggcaaccgacgtggtgcatagactgttccgcggctcaccaaataagtcaacgcttgggatagtttgtgcaaggtcttggcggaaccgatgaatttcttgttgttggcattatggaacaggccactcatcgcctgtaagacggtgaacggcttgaggtaacggagttgatatcgactatcgggtgtccgcatcagccccgtcgatgagatcgctttagctaggggttccatcaattccgtcacgcttgcaatcaggctctcgaaatctgcattcagttgaattgggtgatggttaatattctacaagacgtgaggccaggtataagcgttccgttcgggaggagactcgggtttgaagcaatcccagacttgcctttttgaacatgtacttggcgatatctggcgactcggcttccctgatctcgattctgctgatgtggagcttgtccacgacctcctgaactttttcggtggttctccccggggtggcagtcagggcgacgatacggaagtaagggtgaaccgcctgcaggtaggatatgcattgcacgtaagagtgattccctgacgctttgtgtgcttcgtctgcaaagaaacaaggtggaccaagtcatgagctgagcaagctggatgtcccgaccagaaccggtgctgaccgacgatgaccaggacgatatcgctagcatcgatcctcttctttgccatgtcgattaagaacgtctgcggcgtagcataaaagaccctctttgtactccactgcacattgagcgtgacctcgtcagcggaagtatccgagacgtcttgccggagctcttttactcaccgctgtatctctccatccgtccgggtcgtctcccgtaatcgtggccgcatcggcgctcggtatcccacacgtcgtctgacaagcctcgtgttgttgcgtgacgagcggctttgtcggcatgagaaagacgatcttgcctctcggaaaccagcgatagactgcaacctcaccaatcagccgatgtccaggcgctgtactaaaccgcaatgccggccgacttgcaattcaacatgaccgtccctgcgataaacgtctttcccaacccggtcggcagagctaccagcgtgttgtctaggaagcagctggcgatgatttcgaattggtaatctcgcttgggaacgtttgtcgggtagaggtaggtcgacgcgttgacggggagcgcgaaatgtttcctctctggcgggggtctgagcatggatgggcaaggtcagtacgatccagctacgtctcagatcgatcgttgccgcgggcggactcacttgtctatcaagtacgatcgagcagtaagcggaaagatcagctctgaccgctctccgacccgaaccccatacctgtactcactcggatcgatgaacggcaacgggaattgatcaaacccctcgatctcctcttcctcttcttcgctctcgtcgtcatcatccccctcggccgcagcaccggccacgaaactgacgaccgagcgtttcttctttttcttgccccccgccgccctgtccttgttcttaccgccggtcgagctgaactgcgtcctatcccacgtcttacccttcttcttccttcctagtggttgaaaactcaggtgtgtctgataagccgttgtcgacgagatgggcgccatagagaccggtccgactgccgtatgaagactattcctcgaccctgtgctccccccgacctggacggcaggtctcggggagcgatgtaccgacctgaaccctagttcactctgtacggtcgtggctatcgacccgcccgtcgtcgatttgtgtaccatctcgtcgatcgcgttcaggctttccatgggaagactgtcgagcccgtcatccccgtacaggtcgtccgagcagagatcgatcgggccgtccaggtcgatgaccgagctctgtgatttccctagtatgaaagtagggccgggtgaaggggccggtggtctgttaccgggtccaggtcggcgagggatcgagggtgaggtcaacgaggcaagcggtcgacctggtgggtttcgtttgacattcgggaggggagaccgataagccggattattcacgttgtgattgttgatgctattgttgatgttcgtcgtcacaccgggtttcctaatctggaacgtcgtattcgtcttctcggtgggttgaacgaacgggttcctcgagcctagttgcaccggaacacctcgtgctcctccccgccccatctgctcctctaccttgttcccctgccgcccaaggcttgtcgcatggacttgcggctcgacaggccagacatcggtcgtcgccgcggtctcaatctcatcgatctggccgagagccgcttcgtcaaagacgagatcgtcgaaatcgtcgatagcgtccgacatccctgtcgtcggtcgtcggtcgtcgtcgtctcgccaccaagagtatcaagatccgggtcctgttcggtggagaatctgttggtatcaccagagaacgcctacgacgatcaagaaagaacgacgagcagtaccaccaccgagggtccttcttcggccgggttgtctataactcggagagtcgatccggcgtacgttgaggtcgcttcaagactgttctaagtctacgtgttgctacaagagatgaagcttgttaggatggaatcgagccgggatgccagcagtgaatagtagctatatcattaggtagatcgataggagtcgtatgtacatcctcgtggtgcaggttgagcttagttagtttcgcccctcgatgtaacaaaatcaacaaatcgctcgttcaaagtagaaagaggacacaaggattctcggcgacagagaacatcacgacctatgctaggctcatctattgggaccgcagaggcaagattatgatcggagctgggcccggcaattcgtgcttgaccttgacggtgttgaaccatacttctagtgtgctgttgtacttcttgtcgtagcacatgtttgtagatgccctaggacgcgccgattcgcgcttatgtcgtcctagtcaatcgatcaatgaatcgtgtgtggtctaccgagtcaccgatcatcgaccgatgacccacgccgctgtccatatgggtcaccacatcaaccagcacgttattcgctcgcctgatcgtgtatttcgacaggcagtctcggcactgtgatccctgaaccactcgtcatgtaacgaaaaggctaacgacagggagatcggaagtatattcggaagtaaattgctctcgagtgctctcaagacttccgtgatcggccttcaagcaagcgacccgaacaagtctgagccggcttatgcacgagatacggtgtcagttacctcttggggcgtacggatcgattccaagtcctcgatatggtagtattctaaaaggtggatggtgtctctttcgaacgggcggtgctggtttgggtggtacttttctccctctttcccgcgtgttcactttgttgcttctatcgttccaattaatttaatttagcttcaaccatttccatctacagcctcgagactagcgagactcgacctcgttgatctcgtcgaccccttgacatgttgacatcgacgacagacgacaacgaccacctcgtgctctcaagtacagaactacttcaccttacaaccttaccgttagcaagctcatcccacgctttacctaccccccggaaccccgttctgacccagccgatcgcgaaccttttcaaccaacagacccccctcccccgccgtctcttcaacaatatggccaacctcggggtgcccgtcaagttgttgcacgagagtgtaggacacgtcgtgaccgtcgaactcaagaccggacaggtgagtcccccctcgtccggtgtctcctgcttcggatcggtcgcccatcggggtatatgaaagagtttggggctgatgatcggtcgggttctgattgcgtcacgtccatagctctaccgaggaagcctgatcgaaggtccgtccgtcctttcgacccctcgcccgccactttcacctacttaccaatcctaaccccccaccctgccctcatatcgcacagccgaagacaccctcaacatctctctccgggatatcaccgtgacggggcgtgacggtcgggtctcgcagctcgaacaggtttacattcgggggagcatggtcaggttctttatcgtccctgacatgttggccaatgcgcccatgtgagtcgggtcgtgttcggtgtcgagctcaggtcgcggtcatggtcagagctcgaggacgaggacggcgtgtagagcaaggcgctcgcccgtcgatcctcgttgcttgacgattccttcgtccctcccttgccaggactacgactctggttcgaatcacctcgtactgacaacacacctcctctcttctctcgctccaggttcaagcgagtcggacccaacgccatgcgaggcaagggtatcggtacagcccggtaagccttcctagcccttgctccgaatacgcacaaaacacatcgaccaaggacagtccgctgaatcaatgctgtgtcgttatcacgcccgattgccttgttattagtggacgagcgaccatccaacgtgccaatgctcgtcgtggtcagcccagatcccagggagtaagacgatgagcggggatcggtccttcatcgagggggagttcctcgagatcgttcggaaaaaaaagggattcaaggaggagaagtccaggcgtgatccacgtcaggaagatagagacacacgatgatgagacgaggcacggctgatctgggcgcgatcatggaccgtgggtaaagaaaaggacggacgaacgacccgggtcgaaaaggaggcagggcgttggaagagaccgggacttgccccttgttcgggtacggtcgttcgtcagtgaaaagacggcacggagggatcgcgatggggatggggatggggatggtagcattgttttctgtttcgtggttcggtttgtgcgaaatgttcattatgattcgttttggacgtcgtgagggcctttcagaaagtcaaactcggtgcccgtcccagagcgatgaattggcaccgatttgcgatggatcgttgctacgagcgtgtgtgaatacacgagtctggcgaccagcctacgcgcaagacctcgagcaaatactggtggcaagacggcgaggggattacgatgcacatatttttacctgaacatggttgcaactcttggaggcggagagacgatgccgggcgtgatcccggagaatcaaagctctgaccgattgccgcgccaacggcgagtggatgacggtggcagagtcgtcatctggaacttgggcgtgaatgggagtgaggtttatttatctcaagttgagctcgaatggcatgcttttgcgtgccaagttcagttgcgtcgcgggtttgggctcctggccgagtggctcgggcttacaacgggtacatgcgtgcagtgcaattagactggcgacctttgagactaaaccttactgcacctagtgtttacgttgcccggaaattgcaaatttaccaatccttctgatgattgctagaattctgctcgaagaccaactcgctaccaaggacgaagatagacgacggaaaggtctaccagattgagttcgagcttcgccacaatcgacgggaaaggtcgttcggtcgcccgccgcaaggccacagagtgtggaggcttgtaaaagtcaattaggatgccccaggtccctcaaaaaatgactttactttaaatcgtgacaaggacgcgagacaagcccgatgacctcggtcgaaacgcatcgacggcgaaccggtcacgacaaggctggtaaaagctgaacccggatctggcatggagcacgtcaccttttgctcccatgtcgtgaatacgagaacggccgactattcgacgcgtgatgagacgggtgccatcttttgacggcctctaacgagagagcggatgtctggggagaaagtgtcgcgtgcgtcgagacggacgtgtggactattaccatccatcgattcatctccaattccttacaacccgtccatgcataaacctctttcgggcgacagcggaaccctcccactttatgccttgggtttaggctatcaccggcaacgcaaacgtcatggtcagctcgtcgcccatctcgttcaagatcccgccaagctcggacccaccctacaatcatccatgacggtcgtcttgatctgcactccgatcctcgtcctctcttccggctggggtaccccgttatcatgttcataactcgacccgatggcgagatacttgccatctggggaaaacgccaagcacgagatctcgttgacgaacccggtgtactgcttcattcgtttcttggcgacgtggtcccagatcgagaccgtcttgtccgatccacccgaggcgaacgtgttgtggctatcaaaaatgacgtcgtggagcgcgagacgggatgagcgacgatacgttcgacaacctctaggcaggacgaccgagtgggagtgagactcacgtggggtggtaagccaaggcgttgatcgggtagacgcaatccactccgtcgacgggggcacgatgacaacggaaagcgtaccgttgcgcctgggccgcttcagacgtgtcgaggtactctaccgcgatcctgccttcaatcgaaccggacgcccagcctgtggcgacgacgtggtcgtcgaacgagtacgtaccgggatcgccgttgtatcagtcatcacctccaagatcggctggcctttcgaacgcgaacatgaacgcaccttgaccgtcggccatgacggcgatactcctcgtcataaacttcaacgcgctctccctctgttgactcggggcctcgaggttcctgacgtcatacacgtagatcttcctattggccatcgagacgatgagggtatgggtcgtcggtgcgtaggagagggagtagatcttggtaggaagggtcaaggtttctttcaacggggtcggcgccgagctgtcgagttgggcagggggggggggcatgttccgaacgtcgcgttcagccggggagagaagaggtttgggaccccatcacggccaacccgagcaagtctggggcacaggggaagaggggcaacttgcgagccttgtcagatttggtattattcgctcgcttacgcccacgtacgcacgcggtgggactcatctgtccccgcgggtcacctggacaaatccaaaggcggcaacccagagcgaaaggtagaggaaaatcctggatcgcaaacaaatcaggcgaccttggaccagatcctgccactaccggggaaacatatataaaccaggtcatcaagtgggctgtcctcgtgatcagatcggattcatctacttctttctactcaagctccttcgaccatcgccactcctcctcatcgtttggcaagctcctcctctcgacaacccaaacaacacttccttccctcccgcctaccacaacaaccctctctcgccatgtctaccgttgacgggtccaccgccgtcatcgaggcgccggtcaccttcaaggcctacttgatgtgcgcctttgcctcgtttggaggtatcttctttggttacgattccggttacatcaacggtacgtcctttggctttgccactttgacgcgcgcgcgactcgtcgtcgtcgtcgtttcggaccctcgctgacgtcgtttcgtcatcgccacttgcaggagtcttgtcctcccgagtcttcattgacgccatcgagggtaccggtgccgagaagatctcggcttccaagacctcgctcatcgtctccatcctctctgccggtaccttcttcggtgctctcatcgccggtgacttggccgacacgatcggacgaaggcctactatcatctcgggttgcgccatctacatcgtcggagtcatcatccaaatgttcgctgctgaaggtctcgccgccattgttgttggtcgaatcgtcgccggtctcggtgtcggtttcgtctctgccatcatcattctctacatgtcggaaatctgcccccgaaagatccgaggagctttggtctctggataccaattctgcatcaccatcggtatcatggtcgcctcgatcgtcgtcaacttcaccaaggacagggccgacgacggtgcttaccgaatccccatcggtctccaattcgcttggggtgccatcctcggattcggtctcttcatgctccccgagtcgccccgatactttgtcaagcgtcagaacattccccgagcccgaaacgtcttggcccgtctccgtggacaggacgagaactcggccttggttgaggctgagcttgccgagattgtcgccaacgccgagtacgagcgaagcatgatgccttccaccacctggttcggcacctgggccgcctgtttccgtggatccgtcttcgacccctcgtccaacttgcgaaagaccatcctcggaacttcgctccagatgatgcaacagtggaccggcgtcaacttcatcttctactactcgacccccttcctccagtcgaccggcgctatcgatgaccccttcatcatctcgatgatcttcaccatcgtcaacgtgtgctctacccctatctcgttctacactgtcgagaagtttggtcgacgaaagctcttgattatcggtgccggtggtatgatgatctgtcagttcctcgtcgccatcatcggagtcaccgtcggattcaacaagctcgttcagaacggtgtcgacgctaccggtgctcccgtctttgtcgcccagaacacctcggccgtcaacgctcaggtcgcctttatcgccatcttcatcttcttcttcgcctcgacctggggtcccggtgcttgggtcttgatcggagagatcttccccttgcccatccgatcccgaggtgtcgctttgtcgaccgcctccaactggctctggaacaccatcatcgccgtcatcaccccttacatggtcgacgccgacagaggtaacctccgatcgtccgtcttcttcgtttggggaggactctgcacttgcgcctttgtgtactcgtacttcttggtgcccgagactaagggtctgactttgtaagatcgtcagacagctctctctggcagggtacctgtttactaactgttctgcttgctcgtgtcttctttcctgcgtcaatcgccatgttcgattcaatagggagcaaggtcagtattcgccttggaaacttctttgtgcttctccagctgacccgctttccttctgttcttcctatcagtcgaccaaatgcttgctgaaaccactccccgtacttcttccaagtggaagccccatgcgactttcgcccagcagcatgacatctccgacaaggtcgagaccgagaagagggagatcactgccgagcaccagcacgtcgaccgataaacgcctcgagcccacggacggacgttcggtaccgtgtctacatgcgtttactataatcatctagggattttacgctggcggtgtgcgaggttgtttgtacactgcgctttgtatgatcgtcattatattgtcaatcaactattgatcgatctcttcacacaatttcgcgctcagccgctcagccgccagccgtttacgcccgctgcgttcgtggactgacggtgttgattcgcgaattgtgcacatgcgtggctgtaactgactctgattaactcgaccaggctcgatgatgtagctggcaggatttggatccatttcgttatactgaaagacgttacatgacccgagtatgcgtacgacttgattctagacttatcacgtgaccccgatagggtgacgatacttatgtgattagtatctatcgccgtctatcgatccatatatatataacacatatcatctcagcgtaccgaagaatcccatccaagatcgccccggtgatcttctaatgaggcgcatcgcaagttgttcgagcctgttacactgttttaaacatccattactcgatgccttgaagttcctgagaacaacccgatcttgtccgtgcgcttatttcgtggaccacaaacgatatcattctcggaagaccacgatttcaaaatcaatgatcggcctgccatgtccctctcttcttcgccaatccagtccggtgttgcgattgggccagcagcgaatgacggccagctgccaaggtcaaggctattctattgcgaatgtcgaaactcgttcccgggcgaacctccactcggtcatcgtcggggacgacgagcaaagaccaagaatcgttgatcaccacactctctcgcctttcgacatctgcagctcacgataccgactggtagccatcttatcgtcggggaccacagatgagagcgagactattctgttcatctacatagcaaagacttttattagctttcgcgctttccaccgcctgaacttcgggctcttccgggacactcccaagtatcaagccgaccaggagttcccctgcataccacccagtttgagggcgcaacggataggaatcctggccatcaaaacagaccgcgggttgctcatcgcactctgaggtattgaagttacagccggcccaaggtctgatcgagttgccatgtccggtaagcttgaacctctttcatcctggatcgaaagctatagctgaacaaatgcgagttgccatcgatcctacgctcttttctttcttctcgctggggtcattttgatgtacacttggatggatcaggattccagcatgctggaatcaccaaaggtcagtcgtagggccgcgttctcattataaagggcatgaacgatcggctttcgctgaccgagcctcctctctctgctcgtcctcgactggatatcacttcttcgatacctcggcattctcgcgtggaacgaaacacccacagggtttatcctcctcactggagtatcttccttgacgatcgccttgtccgctttgaagccctatgcacatctccagctcgtaccacatctgacacagcatagacaagtaagcgatccgcaccaagtccgaatctggataacgccgattgacttgtcatgtctatcctttctgcttaattcacagatctggaggcttctgacgtatcaaacggcgtacacgaactcgcccgaagtgttgatggcggtcatgtcgttctaccacctaggagttcctgtcgagcggtcagtgcgagattgtttgttccaccaatcagagcggaatcctgatctcggttcggtcttcggtcatgatagaatgtttggaagtcgaaaattcgcagcaagttggccaggccgatcacatcgacaatatgcacgctgacctggatggtacattacagtcattcgtctttctcgtatcgaccatatctactgtggtatctctcctcgccatgatcgtcctacaacccgtcttgggattcaactacatccctgcaggatcgttcgctatcactggtgccatgtgagtcgcaatgcagattcgcgctagtagtgacattcaagctgatctgagcggattgtgcgatgaaatcacagcacgtaccagtatctgcggcttatgtaggctgaagaactgctcgagttagagacataaagctgacgacatattgaatgcgatggcagacccaccatctatagattccagatgttcggaatcgactgttcgagcaagacgttcgtcgcgctcttccctgcattcgtgagtttgactgcgaccatgctcttggaattcagaacggtattgataccgtctctgtagcttctttatcttcaattcccctcgaccgtctttccctttgtggtcggaatctttgcgtctatcttctacacctcgaatctaaccctcccgctgccatacctccggtcacaacccttgtcctcgttccgacttcctcgacccatctatttgctcctccaacggctccttttcccgctcgtcggcgaatcggctgcaccgcgacgagccgaccggatcatcccggacgaaatgacggccgggatgagagcccaacaagcagctgcgagggaggccagggcgaatgcgacagcgttgggcgaattgctagcgttgcgcaccgccgcactgacgacggcgactgcggctgccgcagctgctgggcaggacggcactcggcaacgacgtacaccaggggctgtaccaacttacgacgtagagggcatacaagacggtgtcattgagccggccaattctgtcacgaccacgaccgcggtgccggccacagtgccaccaccggcgacgccctcacgtacttcgagactaggaggcctattgaactcggtcacgggaatgcgaccgacgagtcctgggtcgagggaagatttggcagaggaatcgcagcccaacgcacctaccgaggagaatattcaagagtgagttataccttcattccatgccgcacctttctgtgctaaaccaggccaatcttctgcacggtagcatcttgaacatgtttcctaatctatcgagacaacgggtcgttgaagtgttacagagaaggtaggcacttgcctccagacccacgtgaagcgcgacgagcttctgatctagtgttgcttctttcagcaatcataacacggccttggctgtagaaatgcttcttgacgagagccactgacgagaccgaattatcctgtatacgaacttactcataaataagtggccttgagcctaccgccacactccggttttgggtagacgtcacgcggtttacgtacccatcggtgtgacatgagcaacggttcgcatccagattgagatgtgtatcaatcgcctatcgccagcctcggactgcaagtcttttcagcgccttgaggtatgtcagtgtcatgaggcgaccagggccgagcatacctggagtggacatcggcattggctgccaactgaccggggtgctgaagccttcattgatgctcaatccaccgggttgaacagattcgaatggtcgacacagccaaaatccccacgttgcaagctttatcgctatgagtctgcgcagaccctgctcatggccaggtatataacgagcgattcaggcagatcacttccgagcacaacagcgacttgtgccgagaccattccgttcctccgctgccaatgcatgcgattccgaatctgcccgttgtcagcggtcttctgatatatgctaacaatcgttgtcttgtgtagatgatgcgccccctgaccttgcgacgctctagctcatgcgatccccaaaaccttcaaaaggaccttgcccaccctgaccccatcgtgtttcttcctggtctgttcccgagccttttcggcaaactccccgtcgaacgtcccgtccttttcatagttgtcaataaagggtacgataatctcctcgtgcctgcaatgccgaaaacagaaatgcaagccaagtgggcttcagctcccggtgcgaaaccctgttgtttgttcgtcccactcggaaaacgggtcgaagactgaccattcgggatgtccctggaaagcgatgatgtgtacccggccccacggatcgctgggtagcgtctcggcgtgcgaatgcgtaaacgccgggggttccttgccactctcgtagaagttgaccagaccctggacgggacagatctcggaggatcctaacagctcgaaatcgggaggtactttggtgacaatgtcagaatggatttgttgcatgacctgccaccgggcgtggaataggggaatgattcagcggctagaaggaggatcgggcgaatggagtgcaggggttgacgtacgacatggtcgggcaggccggaaacgtttttcaaggtcgtcgggtcttccccccagatgatcttcctgccgatgtcggtgagattgatctttgtgctcccgacctccctagaaatccagagaccaggatcgatccgtatcgagtcagcgggagagatgaaagcacacggctgatccgagcaacactcgacataccagcccttggggttgggttcgatctgactagggccaaaggctcgagcgatgacttgcagtccgaagcaaatcccgatcatcctgatcctcggatggtcatcctagcgagaacattggaaccttggacttagcaacgttatggaactcccgacgagatcgaactgggatctcacatggatcttgatcaggtaacccgtcagacgcaagatccaagttgcatcggtatgcgcatcgtcttcgaacgatcccgagatgataatggcatcgatctcgtccagctcttcatctcgaggatactctcgtttgttcagcacgtcgtaacatctcgtctctagtcggagatgctttggaacaagaggttcgaacaggttgtgtatgacttcggaataattcccatgcttttcgatcgccgcgtcggctagtctgtcgcactggagaaaggcgatcgtgattcgaccagatggctttccatccggagtttctgccatgatgtgtggatgatgtcgaatgtcagatttggtaagacgtgggtctacgctatggggggatcgagaggcagtgaagtagcagtagcagagtagttatatccccacgacttgtcgattccatttcccccttttacaaagttgtcttggcaaaggttatatacccaccaagacgtcatgatgagactatttactagctagtcgtcgtcgtggttctgactctatttcccccttcaagtcgaggttgatcgagatgattcgtcatcagattccagcgaacacaaggagcaaacctttggttgtacgtacatgtatacatgtatcatcgttatcgccgtcatcctgatcatatcgcaccttgccggatgattccaagtagttgcaagtataacaaaccgtcacgaactctcctaagtatctggttcgagcggtctctatgcactagctcgctcgggatgggtgacaaccccggggctatttagtgactatcactcgttttaggtttagctcctgccaattcgaagcgcgtgaaaaggggcgaacggatgaaatcccctacctaacagggcaacgctcaaaaggaccgatgtgaatcatgtagatgaagatgagaggcagttcaactacagctcttaaatcgtgatcatcagcgacctgcgatctaccgtattcaggaatcgagaatgaccagtcctgcgcgtggtccgccagtggctacgatcaattcacctagcaacaccactccacgtaattattggttgtcgactagctgagcgtgacctttcctgtcggacgaacgaacccaaactcgcgtgcccagtgtaatctcagctttgtgttgtcagcggcaagggacgcggacggggaatagaacaaggatgtccttaccgctagaatcgccgcctcgtcgaactctttcatcacgactccggtgaggtaacatcttaacgagaagcatccttcggcattgtcgtagctgtcgccagcgctgtggatggatttggttgaagaaggttgcgggggcggggggaggggatttgtacccaaaagaggctgaagcggagtcgttgtcgggctcaaagccggggtcgcctcgtcttcctttgcccgatcggcccacatctggctgagtcgatcccgcatctcgaccgaatccatctcgtcaccgattcccactccgcttctcttagctgcagggtacgccgatgacctctccataaaccagcgaaagaaggacttgcggtcgagttctcctttcgcgtcggcgaacgaagtgggcttgatccaatcggggcgagatagcggatgattactctccagctcagcccagcacttgctccacatcctatcatcgaaaggttgttgatcagaacgagtttgacaaaactctcgcacgcggccagtgaggctgtcgagccagtcgattttttttagtatgagaggatcgtcgcccaagcatgtgacgaggcagtacgatcgcctttgtgtcgggtgcttcccagaaggtgcggatgacgctaagcagaccgtaacaacagctctcattcttgcggcaagtcgggtttgtcgggtcatcgttctggacatcgcgcttgtcttaaacagcatcacgggggcgtccagtggtctcccgcagcctcgccttgacatagcggaatgagacatgtctcaggatccccagctcatcctcatcatgaaacacggtgccacagccaccagactctcctacgggggtcaaatctaattggcctccaattaccaacatttcaaagcctgcatgacccatgacgagcttttccaaggccgcggagcagtggacaagctctttgataccggacaacattaccatattgaggatgagaccgaaatccgaacctatctggctgccaggccactggaggaccaaaaacctctctgacgacgactgcacattgatgcatatgatcgaaccacgatgacgactcgtgcgatttataagctctaaatccctcgatagacgtccaggtctacaaggtcagacgttctatcagccgccttcttctctacgacgatcctcatgcgtcagagccgttcttaccttttttttttttttggccctccagaccggggcgccttcgtatccactgcggcaactatagacagggatcgccgctcctcatgagcccatcaacgatttgtaaatcatgtctcttaaggacgaccaagctcgtggtcgcaatcagagtgttgggaacggcgacaacgacggcacaggaaacttcaaatcaggttcatcatcgcgatcgctacaaggcgtcgtggatatattttcccgtcgtacgcgttacagtgtttgtcgagaggacagcctttctgagatactcgtatatgtccggtggtttctggagtgagaccatgtttgaccactatgggcagtggcgatgtcggagtcaaagtcgacctcaggcaacgcttgacccagaaatagggctcggctctagggagacgggtaaggggatccagaaagaggcgaccacaggaactcgatcgagcctgcatactgccaggacgatgctccatacccaccgcaccgcgacctctgactagaagtaagtcggtacccaaacttcgaaagcaggacctgtgagacgtcggctcaaacgctgtgaccagatcccgaccggtcttcatccggttaccttgccaatcagatgcttttaatcatcaaacctcgaaagcggaagccacgatgtgtccgtgaatccaaagacaaaacggagaatgtggttatttccggaagccagaagctagcagccaatggtgacatgctaacgcggcgttagttctcacaagaaccagttccgttttgctgagaccatacaactttattcttcaacccgctacaactttgtatcatctggtcggcctcaactgacagcgttatgatgctattccttcttggtcttgccctttcttagcggcgcaatcgttttgccgcttgaactgctccccttgcgttccgcctttttgttggccaccttgacggggctttcttgcggatacggcctcttcttggccttgctattgttattgctactggtctggctctgctgagtcaagctcggaggactgtcatcgatctcgatgggatcgttgcccgttccatgggaaatcgacttcataaatcgtccagctggcgcttccttggaagcttgttcggcgctttctctattcttctcgttctgcgtttcaagggtggcgtaagggtcgtaaaggtcgtacattctgctccgcatggataatgggagcatgctcgttcccgtatccagatcgcgctcggtcggaggtcgacgcatgattgaagacaggtcgatgggtagtttcgtggcgttctcccacgaataggtagggttgaatgcggctacattgagcggatccgagttctcgagcgaggtcttttcgtaaggatcttcgttgatgcgggtcgtaatattctcccaaatggagttgaagtacaggtcactcgtgccagagttggattgaccaggcgagatggcggattgagctgcggaatcgttcaattccaagtgttggaccaaggcatcgatctgcgggtctgtcagctctatagaggaacagcgcgcaaggtcagtcggcttgctatgcacggccgggtcgcgatcgccttccaggcactgaccatcgaggaggtacacggtcatgtcgtctcttgccggcgagccggcgaggagatcgtagagttgaattccgacatggaacccagcgagctctgcgctgtccaacaggtgcagcgcgcggatggtagcgagcctgatgccgtcggcgacaaacacacgggacgatttcgatccctttgccctgtcgatagcttccaaggtcgaggccaggacttcgatcagtgcttcgcggttgacgacctgcgagcccgaacctagatcatcctcggtctcatggctgctgacggtccaagcgcaggcaagcatccaaacaatgtcctttgcgcaagccgacatctgtgtagtagtcagaccggcctggttgtcttcttccgcaaacagtcgacgtagataggctaatgcttggacaaggaactgtttttcaagatcagcaatgttgttctcgtggtctgaaaatgtgcattggactcactactcttatggccagggggctatagtcttgaaagatctcgtagaacaaggctctgtgtgcgatggtcaatggcgtgctgaacactacccgtagattcgcatttgcccccgtcatggttgccttggcctcgctatccgcgagcgcgtgacgcagcgcgacctgtatccgggtcctgactgcggcgtccgttgcggtcgtcaatgccgaccagtcgtgaggaaacgaatcgaatgccgtcaagcctgagcgagaagatggaggaaacatcagaccaagctcggaccgatcgacaaagtccacactcacctgccattgttgatgtactaaggaggtcccgtatacacgtctctacgagttcgcgggcctcgtgatgcccctcccagctgaacggcgacttgctaacggcatcacgaacgacagcctgttgccgcacggcaaagaccttgagcggctcaacatggcagagttctcgcagaaacagggccatgtcccggtcggacttggtattgaccgcgatgattgcgaggaacggcaagtgcttgacgactgccgaacctacgctgacctcgtcgaacgccagttcgagttcggcagccaggcctaatcgagtgaagagacttatcgaggcgtctgaagctttgggccgaaagatggcccgcgagaggaggctaacgaagcgagattgttcgggcacggcctgagacgcgctgctgacaaacgccgccatggagcgccagagcggcaaaagcagtccttcgagcaggctgcgaatcgtgatgacgcgtttggagacgagttcgagcaaaagcgagcaagactgtccgttgacggtggccactgtcggtttcctcaagacggatcgagcccattttcgaaacgagagatccatcacgcccgggtagtattctcccagactttgtagcaatctgacggtcgcctcgaccgccttgttctcgccctcgggttgcaggagggtaatgtcgagatcggcgaggccggagagggcgagattccaaacctgttcccctacctggccatcacgcgggaactcgcggactagaccctcggcgagtcggtcgacagcttccagactaggctggcgatggatttcgacgacttcgcggaagagttgcgtggtggacgtgatcggatccatgcatcccgcaggaacgttggcgtcgacgaagcgtgtcagatcttgttccgctggagatggcgtgtacctgcgtgcgatgatgctcgacagatgtccctgcagcgtttcgatacttgacccggtctgctccgagaggcccagggcatcccataccacggcgttacgctgtagcgtttgaatgcagacgagttgaacccggtcgttgcttgcctgcacctcgacgacccgggcgatcagctcaaagatgagctcgtagtcgagcatgctcatgcacgccatgagtagccgaggtagacgagttccgccgagctcgccatcgtgtccaaggctccgaatgcgagtaacaatgccaggcctgacatccgcccaaacgcgccacttggttgaatttgacgtcgaccgtaagtggaccatatcgtccgcagggcgatcgtcctcgctgcccagccaatctgcaaggtacgccctcgtctcgcaaactaccgcctggacctctttatcctcttgttcgttgagttccgggtcgatcccatacagcaacatacgccgttgaaacccgatcgattcgtcgattccttgccacggaagctcgaccaggatttgtcgctcaaacgagtgatcgagcgtatcgtcccgtcgaccgccgatcgagatcatgtggccgagatactcttgatagtcgaaaagtcccaagcggatcaatcgacccagcacctggacgacgggatcgacctcgacgggcgatcgttgagtgacgtccttggccatctctcggatccattcaagtacgacggccgagacgagatgatacctccggctcttctctttcgcctgatccacctgcaagtcgatctcggcagagaaatcatcgaggatgacgttcttgatgacggccacaccgacaatgacggtccgggcgtcgatgacggccctctgtgtggtccaatccagaacatccttgatcctcgccctcgtccccgctcgacgttcctttccaaacggatcgtttccgaacaacgtccgaccgacgcccctgatcccgtcgatggacgatgacgacgacgatgacgatgacgaaggtcgagcgatatcgtccaggaccttggcgaccgatgtcggtataggcgcgggatcgaccgtctgcgtctcctttcccctctcagtggcgggcctatcgaccggtctgggtacgtacatggacaaccagtcgtttgtgcgtgccaatcggtcgagatcggcttccatgcgagtttgtcgtggatcgtgaccgggggaccgtatcggcaagacgagcgaacgaatggtatccttgtgcgtcctccacgtccgaggagacaaaaagtagtctctgtcgatcatccatgccgactaagatgcgacgagcgtcagtctacaatgatcgggcggggggtgacacgaccgtgtactgacccggatcaaccccgtcagcgacctctccactccgatcgtagcgtctcccaagcccaatccccttaaccggtccaaccgttccaaacaagccctgacgagtcgcctcccccagaccttgtccgccatcgtctccggcctgagtaccgcacgtttcgtcttgtccaacaagtcgaggacgaacgtgagaggtaccaagtgtgccgtaaagacttgatgggtgaaccaacggagcaggccgagcggatggaggaagaatttcgtgttcaggtggatcatcatggattgcctatgtagggtcgggacgttggagtaagctgtcagccggggcagcgtgtatgctgggaaggtacgtgaggggtccgggtggggaggacgccgtagggtttgagggacgaggtcgaggtgaacgtcgtcgtcgtcgtcgtcgaggatgaggatgaggaagacgctggtgagggtgatgagggagaggaggacggggtatgtgatgatgaagatgatgagggtgaggatgtcgaggatgatcccgagggggtcacgtagagcgggtagagtgccttgtacgccgcttctttggcagcccacctagtagagcgcagaaggaagataaagatcagagaatgctttgtcgagggaaaggaaggggacgtgtcgactcaccgactggccaagaatcgggtcacggcgtcgttttcaatgttcctattgagacctttgaggacggtcctgaaactcgtcctctctatattatcacccttggctccagctccggcgccagttccagtcccaccctgagcgacctcttgtgcgcgatcgagtttgccccggatcaacgctttaaactctgtcagttccctcgggctgaggatccggcgtgcgagcgtcggtgcgcctcgtttagcgatgagggctttgatgcggggaatatgaaggaggtcggttccgattcctacgatcatgatgatgcgtgtcgtgagatgcgaggtggtgaggttatgatggtgatcgatgttgtattgtgcatttgattgtgagggtgttgatatgatttgatgtgatgcgatgccaggttggggaggaatgccgatgccgatgccgaattgataacaaaaggaatgtcaggctaggccaggatggccgttatatgtcaggctgacgaccatcttacgtcatcacgtcatcatcccttgccaccctaaatctgccgagatatcggtccgggttgaccggaacttcgcgtatcgccggagggcaagagacgagggttacacacaaagggaggaaaaggagacatccatcaaactcttccaccgagatgatggttatatcatatatcaccccagtgcttcactcagcagtgaccaaaagtcagaccaggacaagagcatcctttaggaaagctcagtcactgcgatttgacagatctactactcggtaaacacgggttaacaagcctacaaagattcacccatcaggatccacctaccaatcaagaagcaggtaatttaaaacccgcccgtcgctcgctccgaacattttcatctacaactcgtttgattcaagctaccacgattgccacacacgtacgcacatatatctccacattttaagcatggcctcttcgttccgtccggcgctctctggcctaccccggtcgatccgctcgactcctcgcttactaagtgaaaggcgtcctcttcaagcttcgtcctcgatcacgaccaggatcgttcgaggaggatcaggaggtagacatctgttccattcaagtggggatggatcagcaggatcgcagtcgggatcggggtcgggatcgggatcgggatcgggctcgggatggacaaggatggtcatcgggagtaccagtattcttaccgtaagcttgctttcccaggtctttattcttcttaccgtcccgaactctgatcgacccatcgctcttgctgccacctcgatcggtcacccactcatcctcccgcactgctgctctgaaatcaccccgtgcctcctcgtccacactgtacagctagcctacctgactacgaagacgaccctcgatcccatttccctcgatgctcctcagaagaagaagaaagccgcccatgctgaccagaccgacccacctgaatcgagtttgcaagaacaaccttccgggcagaagatgatcagtgcggatgaggtggcgaagcatgattctagggaggattgttgggtgatcatccaggtcagtctcgtcggtttcaaccgggagcgggtggcgggtggctgatagcttttcgacgtcggggtttggatgtacaggggaatgtatacgatgtcacaggcgagttgggggttggaaactagtgatggtagatcgagcctgtgaagctgacgagaatgacgcaaaaaaaacaacgtggactcggttttccatccttagattttctcgacttgcatcccggtggagccggagtcatcctgaagaaggctggacaggacgcaacgcaagtctatgcccacctgcttactacagccctcctcattgcgatcgctgaccccacctccccttccgactccgtagtgcaatcttcacccctcttcacccacctggcacgttacaggaacacctacctcctacagcccacctcggtcccgttgacccaacgacgatcaagcagacctcccccgccgaactagatccggatgagctccgcgtgaaaaaggctagggaggagatgcctccgatcgaagccatcctcaacctccaggacatggaagacctcgcggaaaaggtcctcagtcggacaggttgggcttattacaggagcgcagctgattcagaggattgtgagtcgaggggggtcttgccacagattgacgtggtgatcgaggtcgcggtccgattctcgtgtgtgagagaggctgatcgtgctcctcgtcctcctttccagcttatcgaaacaacgaagaatcctggaaacggtattacttccgacctcgagtgtaagtcggctgaacgcagctttcacggttcgtcccagtctgacgagacgccctcgtggaatacagcctcagggatgcaagggagaaggacccgtcgtcgaccatgctcggacatcatgtcaccttgcccatctatatcgcacccgcagcgatggccaagttgggtcatcctctaggtgaagtcaacttgacgcgtggtgctggagagtgtgggatcgtgcaaggcgtgagtcaagggaatcgtccgggaagaacgtttgcacagcgctgatttcaagaggatgtcgggatcgctggcagatttcgagcaacgccagttgtagcctggaggaaatggtcgaagccagcaaagacggtcagagccttatcttccaggtgaggcttgtcgccctccgaacatggtcgtcatcacctattgacattctcgaccaacttctttagctctatctgaacaaggaccgagcggcgtccgaaagattgctgaaaaaggtcaacgatctcgggtgtaccgggatcatgttcaccgtcgacgctgcggcacactccaagcgcacactcgaccagcgtaccaagggtatcgtcgatgcacctcccccttctgcgaaagaccagggcgatggaggtaagaaggagaaaaaggccgtcggcgtggcacaggccatctcggggtaccaagacgacaacctcgtctgggaggacatcaatttcatcaggaagcatacgaaactccccatcctggtcaaaggcatccagtgcttggaggacgccgagattgctgccgaatatggagtcgaggggattatcctggtcagtccagctcgagccatgaacgctcggttacaaacgctcacgcgcaaagactcgactcctcgccacgcagtcaaatcacggggctagacagttgaatttgtgggtctaggatgccgtttcctgttcaagacgatgtccaacgcgtgtcccttttacagcgcccccgcttccatcgacgttctgtatgagatccgacagcgaagaccggaacttttcgacaagatggagatctacgtcgatggaggcgtcaagtcgggcacggacgtagtgcgttgttctcgtcgtgtttactgtgcgggtaatccagctcatcgctcttctgatccaggtcaaggcgctcgcgcttggagcaaagggggttggattagggcgatcgttcttgtacgccaacgcgtgttacggggaagagggcgtacaaaaggtgtacgagagtgagtcgatcaatccccatctggatttcgacgggtcgttgcggattgcttaaacccaatgcctttgcgatagtcctgcactgggaggtatgtgcagcgatggccatgctgggagcacacaagatttcagatctgaaacccgagatggtcgagcgcggctggtggtttggtcagggtcaaagatgacttgatggaagagcatttttcaaggcaccaaggcaccaacctgtagatgacagatgatatttcacttttatgcgtgctggtgctgttctgtgtcaaccttccccgtcgttgactcgtctaagtcaaagccaccctgttcatctctactcgccgccatgagctctttcggttgtggagattcgaaggttgtatcaggtggttacagggatgcatatggtcaagtgaccgtcatccagagatcgctcactccagctacaatcttctcaattacctcggttttcagctcttcgacgagatcctccacctttgccttcaacttggtgtactcgctcattttcacttcgtaagcgtccaaacgtgctgagtggttttagagttttgaaccgtgcttgttgatcaattcattgtgttcaatgaagatcgattcagcggtccacaatcggatggctaggtcattgtgacctaactccaatcttgccagcaaagtgttacgggtgcggcaaggttccattttttcactgttttggttcagggtcgtttgtcagggactgttggcagatctatttgctcggacttacgatttcaatgagagtttagggaaaggacagttgttacatgtatatatgagatgggaatggtgcaagcttgtctctggttccatctactattcgatgtccgagcgccagagtcgatattcgcgacatactaacgagcagcagaagataaaaggtgatcgtgaacaggcgtttgaggtgggtgagcatccggtctcatcaatcccggcaaagtgacgcctgttgacaagatgtttgccgtgttacctgcgcctaccggactttacaggacaaagaaacagcgatctagtcatggacccgtcatctgcatgcgggactctgtcaggatgcttgaagtgaacaagctccaacgctctctccgctgcgctaccccggcttgctgaaactttacgagcatgatgacaagcatacatggatcacctctctaatgctacagtcgccatctagttgacttctatgtttttgtaggcctttcctgctacccgcctgctcctaccacctctcctagcaaaccactttcgaacattcccgaccattctcgcgagaggtctctctgcatagcgctcgaatgcgaagcagcagacgatgttgacgatgatgattgccagcaactcgaagcggaacctgtatgtcagctcgatgatatccagaaccaacgcaacactcttgctaggagccagaagtacccaagcactgaaagccgtcagaacgacgaaacagccgacgagcgacactgcacaattggcgactgtcagctttctagcaatttcaccgacttggccgacgcaaactcacgattcgagtggataggctttcggtaggggggtccgacgctaaacacgacagcgaccagaatgtactggaagcaagagacgaggaacaatgccgtgttctcgtagttgaaggtttcgagcttttcgtcatcgacatccggcttggtatacctataatgcgttgcccttgtcagacggagggtgtacatgccacgcaatcgcccttgcgaacgtaccagggctgctttcggatccagatgaacacgaacacttggattgcaaagttgatgatggtctgaccgataatgctcgttaggactttcttcgataccaaactggcagtaggccgcttcgggtggattttggggtagggcagcgtgcgtcccactgcgaggttggaaggaatcagttcgagtctggttttgtttttccggaaaggatgcagtcggtacgcactggccacagcgataggtatgataatgaacaagtcgatgtagaggaatctgatgtgtgaatgtttgtgagccaggtatcagcgaaattgatcgaaagtctggcttactggaagtcgccgagactcgaagcgaaagagtaaagctatgggttactcgagatcagcgctgaatggaagggcaaaacgtctcaacttgttcttaccagagtgacggtagtgaactggatcaacgaatatagagccctaacgagtggaagattgcggttcagcaagaaacgccagcaccgcgggaagtgcgcttgtctcacatgtatttgaaacagctaaagctggtcacgagcgcagctcggccctctctgatggtgggtagtacggatgtcagcttgcgatcgaaaaagtggagacgaacagagctttgacctacttgatgacctcgatgacacacgaaatgtccgtgatatgactcgtaaagggcgcggcaaccgaggcctctgcctctgacaatgagataccaatgtcggcagtcttgagagcgccacaatcgttggctccgtccccgcagaatccgaccgtgtacccaagcgcctgtaagcgttctaccagctctgctttctcgtccggcgacatgcgcgcaaagatgacgcccttgaccaacatctgaggatggaaacggatcagagatggtcagccacgttgattctcgatgtgcgctcactctttgcatagtctcgaggggagcaaattcaagcatccagcggaatacatctccagtcaatgcgagctggtagtctggctgttcagtctcgccaggatcgaaacccaaggcatagtcttgcaaaattggcttcaaggagtacgagtcgagcttgtgtttttcgtcgtctacactagtccaggtgatctcggaatcagggttatggcttccacctacaagtgacggatgcaaggattgtgagttggtctcgcaagagatacgatcgacgttgctggcgctcaccactagcgaacgtcggtatatagacgctcgccgagtgcgatactagaccacactctcgagcgacactgatggcagtccggacgttgtcaccagtcaccattcgacaagcaatgtgagccgaacgaagggcatgaacggctggggtggtcgcctccttcagcttgttctcgaagacgatgaaacctaggaaatgcaagccactctcggcttgctctctgtcgcgtagaacgtccattagcagcaagcaatggcaatagcgtttatgcgggaccgacctcttcatgcgctgggctttaagccaagttagtccttcgacgctctttccggcgatagcaatgactcggaatccatttcgtgtatagtatgaaagcatgtcctcatagtcgctcgggactgcaagaccgcacgtcagttccaattgcatcgggcgtcttttcgagacccgacttacaagtttcgggatcgcagatatcaggcatgacctccggggcacccttgacataaatctccatgctgttggctttgagacgctttacaatgacgctcattcgcctgagagccgaaacgaaatcaaaggtcctgatcacaccgagctccaagaaatgggcgtgctgaaggacacgtgtgtaagcctaggtgacaaggggtgcagacgcgtttgctcatatgctcaccttgccgcccgatttcagggcatcttcgagcttccagcgctccgcaccgggaggtcggactaccgtctggaccagagtctggggcctgtcgacgacacgcgcctccttggaaagagcgtcaccgtttgcagcggcagcaggtttgctcctgccctcgtccagtgtccatccagtccattcgaacatcttgatgtcaagaggatcgcccaaaatctcgccatcgatcaacttgagcgaatgacaggtcgccaatgcgtaaagcaaaggcgtcttcccgctcaagccgcctcgatcgggaacttcggagacctcgccatggagttcgctaaaccgctcactgtacttgtcgacggtacgaacgccgagcacgtccaggccgtcttctgtaagggtaccagtcttgtcgaaacagaacacgttgactttgcctccgatgttgacacgattgggcgaaatgcagaagaccccgagctttcgaagtcgatcgatggcaaaggtcgttccaatcgtaagggtggcgggcaaggcggggggaacgacgatggtgatgagatcgagcgctcgaatcaagatggtgtaccaggcgatctacaaccacgagcgtgaatgaatatttggagatcgtgccctgtgccagtgtcgaggactcactcccatgcgaataaactgtacagcgctaatggcgaacccgaatccggcgatcatggccaacacaccaatgaaccgcatggaatcacggctgcgaggggcgaatcacggtcagatgcggagcggcttggacgatgaatgcacagcaactgactagaacttgaatcccatgggctacggagaaaggagacaagttggcaaactgtcattgcagcgtacttcacaacgctgaactgaccttggggaatagcatggaccgaacaagggcacccttggtcgtgttgaatcctgcacgacaccagcgccttgtcagccgacgcgaagtacgagcccatcgagatttcgcttaccagtcctcgtgaccatggccaatgcgcgctgcgcatcgctcttgcctcccaagcccatgatcgagccaccgggtcgaacccggatgatcttggtcccactgaaaaggtagtgcttggcaatctcggcgtcgacctcggtacttcccttcttgtcttcgcgggcaagggaacggatgacatcgtctttgaccgggaccttgctcacgggcacggactctccggtcagcatggattcgttgacgatggcgtctcccgagagcagcaaggcgtcgcaggggaacacggtcaagctagggtcggaagcttcaaagacgtctccgggaacaagagaagccgagtccatggttgtccctgcgaggttgcgttgcaatagtatttgttgatgggtcagcggtgtgccttgacagcgtttttcctttcaggcgacctacattcgccatcgaccaagacccggacatcgcagctgaatcgagacatctccctcatcctctcgatcgtctatcggccatacacgtcgtcagcgttcggatccgaaacgatagccctcattcacctctgcgggcgcgactcaccctcttggtctcgatcaaggtcgacaagatgctgctcacgctgatcaaggcgattgcgaatgcatagtaatagtaatcgtctatcgaccacaaggcgatggaagcgatctggaagacgtagaacgggtgaaggacctaaggacgggagaggtcagacgcaacgcacgtcgttatcaggacgacgtggaaccgagctcacctcgtctaggagcagtccgacgacgcccttgccctcgatatcgatgacgttgtcgccgaacaagatcctcctctgttccctgacgtctcttcccagaccactagcgacggccttgacgctggtccatttaggatccctccaatccctgatcaagcaccacctccccgtgcccggctggagcgcaaacttggtatacctatactcggccgtcttgaggaaccccatcgtctcttcaaaatgtgtctgaccttgctcgagatcgacggtcatgaggtctttcgccccaccggtcgagacggtgccgttggacccgtcgtccgtcgtcgtcggggcgtgagctcgagcgactgcggccgccatgatcgaaggcgccctcgaaccgttcgtcgaggcgacggtaggcgccctgcttgccgagacactcttccctcctgccatcgtgagggcctgcgggaagacggtcgacaaggggtaaggatacggtacgacgtcctgttggatgatgtgcaggtctccataaggcgtctcgacgaccaaccatccgtccttgcccgatcgctcaaagtcggtctctttcccacaccacccgacccagatcgctgggacccaacgaccaaccaatcctagcccgccgagggtgacgacgcatccggtcgcccagatgacgcttttgagtttggcggtgacgtacccggtgaaccggatcgagaggtcttcgtccggcaacgagatggtctgtttggacgaggacgaaatgtcggtaaacagctggatcgaggactgatcgttgggtgccgagggatccccaaagatgccgtccgagggtaacaaggggatcggggaggaaggacgggattgcgggggcaacgacgtgtcgtcggccagggaagacctgaacgactgatcatcgtcgtccctatccccaccggacatttccgaatacgtatcccgttcgttggacgaatagccccagttctcttcggactcgatcgaggttcgggatcgagcggacgaggcggatcggcggtaagacgatccggaagtcctgcgtgagcgggcgtaatgactacccctggaggacctcctcctagcacctcctgcttcttcgtcggcgtcctcgtccttgtgttgatggaaccccagcgccgaggcgatcctgggtaacaaccctgggctgggaggagcgatctcgtcgacatccaatggaccttgatcccaatcctcctctccatcgctgagggcgttcgaacgacggctcctccgactatcgttcctcagtatcctcggcctatcgtcgtacccttgtccatgatcgccatagtctgagtagttgcccgagtttcgtctcgaacgcgtgacgtccctgctgtaccgcctctcgtcgccatagctcatacgagcgcgggaagaggatcgacggagggcgatactgggtcgacgggcttggtgcatgaaatgcatcgaggtgatggaggaagggaccgagaatcctgcttctccggaccatatggcagcagaacctggaatcggtcgtcgtcgtcgatttgaacatgtcagtaacggtagcggagacgtcccatgcgagacctgcccttgcatggacggaccggatcgcgcgagctttacttaccagaatcaggtccaccgccttccatattctgaccgatgacttcctctccctcttttcgttgctgttcgatcgccagggcgatatccgccgccgaggcgttttccgtgtaatcgtgttcatcccttggagattctgaacgttcggccgatgagccggactgctggggttgatcgtccatccgaccgaagtcgccgtcgtcgttatcgtcgtcttgcaagcctaccatgatgcttgtctcatgggttggtatgactcgagtcgtgtagcatgaaggtgtcaaagtcaaagtcgagcgagtgaacatcatcatctcgcatcctggccatcctggtcgatattcatttcctgacaagatcaaaagctttctcgcgctcgcgtctcgtcatcggatgcaaatattacgttatcggaagtaaatattacgttatcggaagtaaattcggacaccacacggataccgagcgagtaagtggctttttcaacagaagaggcaaaaacgggtaaagctcgcaggtatgatatggttataccgagacgaaccccattcacccgtcagtgatagcaagaatccttgcgtcaggcgaacatgagctccaagatcggcctaacccctggcaacgtcaacctggtccagaatgagaccatccacctgacccccggccacatcaccgcgtcacccgtggtagatctggccatttgttcccatatcggcgctgcggcaggaccgtagcgagcaagaccaacgtcgagactcgtctcgtctcagccaaaccgtgggtcccgcaagaggtgctcacgcggcccggtcccgaatcgaccttgggaaccgatccgaaccgaggtggcgcgacagaaaggttccatgcaaaccggacatcacttctcatattaattgttactactacaaccacagcgcgaatcatctcatctactttttctttttcaattcggacgctgtcgacgatacaacagaagcagatcgttgtgcggcgcgctgctgtaagaaagggatagacggacaaagtccggcgtcaatgtctcgcttcgtgtatgaaagcccatgcaaactgacactcttgggtgcggcctcgggaccgttctccgactttggcgtcgaatcctcctgaccaccagaagcgaccagtgcaggggtggcaaccgccgttgaatccggttcggtaggcacgcttggtagaccggcgctgatggcaggtacgatcccgtccctttgcgctttcaatgtcctcacctcgacttcgacccgatcgacgagccgtttcatttcgaccaatccttcggcagagtgaatgaccttttcgagcgcgacgacattgtcccgagtgggcatgaccagccggacagtcgagatggatagctgtgcgaggagcgcgttggtcttggtcgccaaatgcggtttcggggtgggtagtcgggtcgatcggaggtaagccggttgatgcgtgtttcgagaggtcgtcagttgacccggttgaggtggaacccgggtgatattgttgcgttcgtctgtcgggaaaatcgcacgacgcagcaagtcgtaagccaaggggtgtttccaagttggcgaaccatggtcgggggacgacactcaccgaacatcggatcgacttttttcttgacgggcggaggtgggggcatatccacatcctgagctggttcgccatcctcgcccctccgtcgcttcttcaacttgtccgccaagacgctcccatccgcgcctcgtgccagaccgatcccgatggcttccccccttccaaacgccctgttcccttgttccccgggaacgaggataccggaatccaacccgcccatgacgcgcatcaattcttccctatccgagcggtatcgccgttcggtctgttccatccgtttcagttcgacgtagagggcttcctcttccagcatctgcggacggctcaggtggaacaacgagttggcatactttttcctggcgacctcgcggtctgacccgtgcggccacgttttcagggtcagcttgcatgcgacggctgatgaggcgtgtaccgaggtgtacgacggggggcggtgggtaggaaggacgtacgtatatcataatcgaacgccttgaccatcttttccttcaacgtctcgtccacggcgggtcgattccgtaataaccgcctgcagacggtataataccgatccttgatctcttccatcgacctcgtcttgacgtccgtctcgacgggcaagaccggcgcgttcgagtggaacgaggatgtaggcgcgagaggggtgacggctcgacctcccggggtcgtcaccccgagcgtaccttcccgcctcgaactccgtctgacgtgttccgccgacatccccgcctctttggcttccttgttccccttcctcttgcccccctgggcgttcttgcccgtcccgaccaaagacggccatgcgtagatgccgtcaaaggcgtcctgccccgtcttacccccaggtggaacgtaggcataccgatcggtcacgacgaggaaacgaagatcgtacgtcttgagcagggagaagaggtaattcgtctcgtgcggggtccagcgttcgtctaccggcgtgggccgtcatgatggcgtttcatgtcgggacccggaagacggagtggggttgagggatacgagaacgaccgatattgaacggacggatcagagtcgatgatacggtgtcagctctacatcccacacacacgaggttcgacagcagagagacagacggtcccgaactcgactcacctgtcaaccaagcttcatactctgtctgactataggtcatgacgttcggtccattaccttccctcccgaacacctcgaacgggtccggttcctgcgtcgtcgtcgcgatggtcgtctggtcgaccccggatttcccatcgtcctgcagttgggcttgcgagcctttcgggtggttcggatcggcttggatgatgggtgccggaggggggacgggtttccaatgtcggaggacgagcggggtggatcggttcgagggtgtgaagggggtctgacgcctgatgtgtcccagtagagcgtgtacgagggtggtcgttggacgggtccgtggggaaatgcagggaagacggggagagcgcgggaaaggaggtagaggggatggacgaggtcgtcgaggtcaatccgggataaaacgtgatatgttccacagaagaaccatggtaggcgaattcagaatcgagtgtcgaatcagtcccatgctcatatccacccgtggtgcccgcgtcactcgactcaccacctcctgacctccctctcctaaaatcctacgaatcggtaaatccgaccccctacccccctaccacccaatctaaaaacccaaagcaaaaactactttcaagatggtaaagtgagtgtcgtcaaacagcagagacaatgaatgtcgaaagaagataggggggaatagaaagctcattcatgaacgtctttttcacggttatcttcttcccttttttcgtgccatcttccgcgtaatccaccgattcatcaatcattcgatcgatcgactcgtcaatgaatatcaccggaccaccacacctctctttccacacggaccatttgtcttgatcttccttgatgattgaaaccacagcttcaccgtcgatgagatgcactcgtacgtactgtacccctcctctgcacagtcgtgctcgaatccaagcatccgtcctgaccgtccttgcgtcttcgtcttcttttgaatgatacaggctcatgagcaagcctaccaacgtacgtacacgctcgtcaagaagaggaggaggaatcgagtggttggtttgggggtgataagggggtgatcactgatatttctctctctgtctcttttctctgtttttcgtctcgttgatgatcacgccgtgttcagatccggtaagcaatcgaacccccaccctcacgcacttgtcgccgtcttgatacaacaccgtactgacctcgatctccatctcgacgcgtcgatcagaaacatgtcggtcattgctcacgtcgaccacggaaagtcgaccttgaccgactcgttggtctccaaggccggtattatcgctggtgccaaggccggtgacatgcgattcaccgacactcggtaagtcgcccatgcatgccgtccaattctgcgacggcgatgaagattgtactgaccccgggctgttatttaatcctcgtgtacatcgggcgtacacagtcaggacgagattgaccgtggtatcaccatcaagtcgaccgccatctcgatgtactttgagctcggaaaagaggacgttgccgatatcgcccaaaagaccgagggtaacgagtttttgatcaacttgatcgactcgcccggtcacgtcgatttctcgtcagaggtcaccgccgctttgcgtgttaccgatgggtgagtcccggccgtgcgcgcgggctgtctcccccgggttcggttggctgacgtcccgccctcgttctcacgtgcagtgccttggtcgtcgtcgacaccatcgagggtgtctgtgtccagaccgagaccgtcttgcgtcaatcgttgaccgagcgtgtcaagcccgtcttggtcgtcaacaaggtcgaccgagccttgctcgagttgcaaatctccaaggaggacttgtaccagactttctgccgaaccatcgagtcggtcaacgtcgtcatctcgacctattcggacgagaccctcggagacgtccaggtcttccccgagaagggtaccgtcgccttcggttccggtctccacggatgggcctttaccctcaggcagttcgctcagcgatacgccaagaagtttggtgtcgacaagaacaagttgatgcccaagctctggggagacaactacttcaaccccaagaccaagaagtggaccaccaaggctaccgacgccgacggcaagcccttggagcgtgccttcaactcgttcgtcttggaccccatctaccgaatcttctcggccgtcatggacttcaagaaggaggagatcaccaccttgctcgaaaagctcgaggtcaagctcttgcccgaggagaaggacctcgagggcaagcccctcttgaagaccatcatgcgaaagttcttgcccgccggagactcgctcttggagatgattgtcatcaacttgccttcccctgccaccgctcagcgataccgtgtcgagaccttgtacgagggtcccatggacgacgagtcggccatcgccatccgtgactgtgaccccaacggtcccctgatgtgctacgtctccaagatggtgcccacctcggacaagggtcgattctacgctttcggtcgtgtcttttccggtaccgccaaggccggtcccaaggtccgaatccagggacccaactttgttcccggaaagaaggacgactcgttcatcaagcccatccagaggaccgtcttgatgatgggtcgttacgtcgaggccatcgaggacgtccccgccggtaacattgtcggtctcgtcggtgttgaccagttcttgctcaagagcggaactttgaccacctcggagaccgctcacaacatgaaggtcatgaagttctccgtctcccccgtcgtccaggtcgccgtcgagtgcaagaaccccgccgatctccccaagttggtcgagggtctcaagaggttgtccaagtcggacccttgtgtcaagtcgtacatggccgagaccggtgagatgatcgtcgccggtgccggtgagctccacttggagatctgtttgaacgtgagtgttggcggctggagcgaattgttgtcaagaggtacttcgagctgacccgtgcctgacgccgacataggatttggagaacgaccacgctggtatccccttgaagaagtccgaccccgtcgtcggatacaaggagaccgtccaggccgagtcctccatggtcgccctctccaagtcgcagaacaagcacaaccgaatctacatgaccgccgctcccctcgacgaggagttgagcaaggccatcgagtcgggcaaggtcgctccccgtgacgacttcaagatccgagctcgtctcatggctgacgaattcggttgggacgttaccgaggccaggaagatttggtgtttcggacccgagggtaccggacccaacttgttggtcgacaccaccaaggccgtccagtacttgaacgagatcaaggactcgtgtgtcgccggtttccagtgggcctccaaggagggtgcctgtgccgaggagaacttgcgaggtgtccgattcaacatcatggacgtcaccttgcactcggactctattcaccgaggtaccggtcagatcatgcccaccacccgacgagtcatgctcgccgcccagctcttgtccacccccggtctccaagagcccatgttcttggtcgagattcaggtccccgagtcggctcagggaggtgtctacgtgagtgtccgccgtgtaggagacgacgcatgtcgaccgaggctgaccattctcgtcttgttccgcgctcgatagtcgtgtttgaacgtccgacgaggtcacgtcttccactcggagcagcgagtaggaacccccatgtacaccatgaggtgagtctagtcgggccgtccatcgccttcgcgccgttgctgacattggcttcgccacgcagggcttacctccccgtctccgagtcgttcggattcaacgccgaccttcgtcaggccaccggtggacaggccttcccccagtccgtcttcgaccactggtcgctcatgaacggaactcctgtcgagaaggcgagttttacagcctcgagtgtcttgttacaacgctaatacttcctcatccttgccgttaacaggacagcaagctggccacattggtcacggcaatccgaaccaggaaggcaagtcggggtctttctagtcgtcccgttgaccacgtcactgaccatcatattgtctcgctccacagggtctcaagcccgaggtccccaccttcgaccagtactacgacaagctctaagcgactcgcatgggacttgtatcggattgatatccacctggcgcatgcagggttcttgttcatatattgcaatcaatcgactcaatcgactgttctcccgacttgttctcactctgttctgttctgacgacgctgttcgatcaaagaagccaatcgtaatcgtttgcggcctttcgatcgaaacgtgcttgtaggtttgctccgacctctggccaccggccactaaagtctatcccagccgcaacgtatacaacagagatggcttcagttctgcggtaacgatgaggcgcgcagctgaccgaatctcggggtacctcactcccggccggccttctgttggccgcatataaataccagggatacgtatcgttgatagcaaagagcggtgtaactacagactcggggccgcatggagccacataaactttatcattcttcaacagtcgacgacataaatatctcgcgcatcattcagttctcgaacccgtcattagagtcatattttatcgtctttggggcgtagttgaggtcgaggtcggcgggttctgtgggggttttgtacttcaagtttcaaggcggactcgcttcgcggcgtgtctaaaaacagacagcgagtcagatgcagaaccagtccacgatccccagggtaacgtacggcgcatcgaccgacgacgaaactggtcctttgcccgaagagtggcccatatctttgtcggtcgcagagtacgcttcatccgcttctggactcgtatgatctcgtcatcgtttcccggtcatcggatactcctcctcaacctagctcgaacatgggacaacgtcagtctctcttccgccggtgcacggcatatagtcggattgggccagactttctctaccggagcagatggttcttgatatgcgctgtcgcatgggttgggagcacaaagtctctatatcgcgtgtacagccctctctatggtatatatagttgctacatcagacctgcataaaacccaaaatcacaccgattgccaagataccgtgagcaagccctacccggtccgacctgaccgaaccgctactgctgttattattcgtcctcgtggtcgtcgtaccgttacccgaactgcttcctgtactgttcgacacggacaagctcgccggatgctggttccagaagtaaaacggctcccccgtatactgctcgtccgcctgttgcagaaactcggtatacttgtcatccccgtagataaagtgcatcgcagcgaccgaggggtagagctcggtgggttcctcgtcaccggggggaacgtccatcgtaaaatcacaagcggccttgatggtgcccccagcgtcggtagtcgaattccagacgtcggtcaggcctgcatatgcgccgagtcgagcgttgctctaaggcgggcgagcggatacagtgagcgttagcgagatttattgtttggaatctgacggagaggtcactcacgaccatggcagcgaggttgtaacaacgataatggtacggcctcgtcctagcagcctccagtggctgtagagtcccgttcaacacattgatcattgagtgccattagacataatcccatcctcgtcaagccagctcacctgttctccattggcctcgatttgccccttgaacggtccggcaaagtagctcctactcgtattagcagcggcggtcatatcctcgagtaaaatctggacggccgagagttgggcgtaatagaacgaggcgtgattgctgcaagaccgagagtggtcggcctcgaattatcattccaagcaaccgagccgatgacaacactcacttcgaggacgccgcttcggccagtgcgaggtcattggacatcaaccacccttcgtacttttccatccatcccttcaacccgtcgtccacctcttgcgtccacgcctcggctcctccttgtcggacaatctcgaccgcagcggcgatcttgatcatccccttcagatccaaaatccccgtcctagctccacgtgcaggggacccgtcttccctcggcccacggaccatctgcgcatattcgaggttgggattcatccgggtctcttcgtcgaggaaccatgtccggatgtagtgggtggtgcgttgagcgtaggtcgtgttcttggtgatcccccaggcgagcgacgagtagaggacggcttcggagaggtcgttgaaagcgccgatgttgtccaccaagagacgatcggggacgaatagaccgtcacggttgtaatacgggcaagtggagtagactgtcaaaggtaatggtcggtagggtcagctgcgaaacaacctgcgtttcaaaggtcggcacagacgactcgctttcttggttggtcaactcggtggtgttgccaactccggtacaattaggccaccagctgcgggattcacgcaaggctgatcaatactcgcggttcgacaccggaaaagatctagactcgggtcctgctcactatggtgcccagctgacatagtcgtgtaaatctccgctaggcggtatgaccgtcttgttcgtcaccgctgtggtcgacaaagaagattcgcctagtcagtctacagagtcccctgtctcttgaaacgacgctcgtcactcactccatggaccttgcgaatcgaaccggtctgaccactgcatgatggtctgcgcagaccattgaaggtcgtccacctggcccgtcccgtcctccccgaacccaccgagctctgctagtcggaggatcaaggatgcgttggggaagacgctggcatatgctgtgggggagatggtcgggtgggatgtagattgtgcgagtgccgaggtggagaagagggtgagggtgagggccagatgtcgcagtaggtaggaggataacatgatgcaatatgttttaccgattacgtaggactcggtaggacctggtcaggtattatgatgaaccagaggatacctttcgtaaccagcaggattcattcttgtcaagagtggaatgatacatcgtatgatgaacagctttgatgagccatgagccatgagcatcacaaacaaatcgttcaacgcccagcccacctcgtcctcggcctgcgacgccactcccgagaaccacgaggtcgatcattgtccaagcgggaattctcatcgtctcccttcgtcctgaccgcgctgctacccggatgatgtagccagccggataacagtgtatcttctcccgcagagaaagggatacgaatcgaggaaagcgtggttgttgttgttgcgctcggcagtttcgagtgacttttgcttccgactgatcccactctgcaaccgagaaggccgagttccggatgtaaatcacgagaaacgaagattgaattcaccgagagctcgccgagccaatgcagaagaggtcatctcgactgcgaattcgagctcagggtgaatgtgcgtttcactgtagccagagggcttcacgtactgatccggccatagtataccggtccattcggatagctgagcctcatggatgacccgaccaggaaataatatgcgcgggatcgccttcacgtcactggatctgtgggccgaggccgaggtggaggatgatggacaggtgccgaacgaccgtgagcgactggtgacctccttaatgtatggccgtgtatgaggacatcacgactggtatcagtaccgttgccactggacggacattgtccggtttgctgatctattgatctaccagtgcatggatacgatgctactctagctactctcctctttcggcacttagcctttcaacatcatgcgatacaactgcctcgccgacgaatcgcccgagatccgacaatgtacctacgtctggattccagcctgccgcacctccacctcgatgtacagattggacacatgttccggaaagtcgccaccgtcatcatcctcgtcgtcatcataatcgtatgtctccccacctcgatctatttggtgatccatccgggaccgtatcgagtcagagctccagacatctgcgtaattgtagcgggatccgttccgcgcggcaccacctccaccgcgatctgtaccccgtgtcaattcaataatggatgaagggtggtaggagtgcggatacccgcaagactccgctgcgctcgagggtatggttcacgactggccccgtgggtcaaagggcgaggatgatcaagcaagcgatcgtagcgaaggtagacaggtggacctcctcgtaccggtctccccgaccccgaccttgagggggggttccagctgaccgagcgagaaacccacccatgcacgcgtgcgcggaaccggtcccgccccagactgccagttttaattatttttcttgatcatcccatcggtcgagacccgtgcgccgcccctctagcgcagggaacgtatctcgcctcgaccgcggtcagagtgtagcagagtggtcaatcttttcgatccggaaaaagtcgagatacgaccgtgcgtgatgggtaatccatctgcttagggcgccgcaccgatttggtggaccagagcgttgtatatatatagacgaggtcgtccggctcgtcttgaacagctcatacgtcgattgatctgatctcctcgctcacacaaaccgaaccgcattcaaacaagcttctagccagctcctgatctttacgagatacaccgaacctcaccgaaaaatgtctagcttcaacatccctactccccagactcaggaagacgcctatgcgctgatcacccgcgagctctactttaagcgagacacttgcccagactttcagtgagccccgcctggtttcgttcctgtattcggctggcgactcacctctcgcggttgcaatcacccatagctacgccgtcgacgttctcgatcgttatgtccagaccaaacgtcgatcaggacgatcggatgtcgagctgcagaccaagctagaccaactcgaacgcaagttgcgtcgatcccctaacgtgagtctctggaccccaccttccgacgttcgtatacctcccttatggtgcacgagctgactcgcctctcgtcatctcgtcatcacaggcccctatcgcatggctcgaccaggtcttccacgagacccactcgcgtacaaacgtctaccccagctgtgactcgtccgtcgcttcggtccgcctgaactggaaatccctacctctgcgccgctcgtccggggattcgacctcggcctcggcatcggcgtcgtcttcctcgatccgacgatgggcggaagctcaggaatggaacgaagctcctccggcttacaccaactaggtcttggcccgtccggcctggaaaagaatgaattttgggagcgagtcgaggcggataggatcggctcggattggatcacattacatcacatcacactgtatcgagtattgaacggcccggttggatgaatagctcgaggggcacatagatctcgtgtacgggaaacaaacgtttcggttgtatacattaggacaggacaatttattacgatcacgtacctataatatcaagtcgagaggatgctcgttgatgggctcagggtacgagatcaaggagaacttccggacgcgttcagctggacgcccacgtatctaaaagaggttgccacgagatgtagatgggtcagaccacttcataggaccgctcggttgaagcgcccggttcatgctcgtcggcggccggggtgaatttgatcgacgtgagcgtgctcctcgaggcatatatgggctattcagtagatcggagaggcgttgtacagttggtaggaatggatatcagacggttagtcgaggtgacaaactcgtctgactggactatacccgataacttgatcacaccattaaagcgatcgaaaagagtcgaaaccttggtcctggagtgcgggatggttgaacgttcccagtgtgacaatatggtatagaacgaatagtcgcgagagagctagtcgccctaggacgtccagtggacatggcgcagcattttgaatagcgattgagcgaattgtactgcagacagatgtgtggatcggtatgagattatgccggaccacgttggcttatgccggtggtctttaaacggcccgtaatgcccacaacgcggcagccagtgcggatcccaccgattccatctggaagttaccactcacccccgatttcgactttgtgctcgaagaacgcgacggactgaggggcgtgcattgaaggcggaagtcttgagggatcgcgcggccaacttcccgttgtagtgcatgtggtagggaccatgattatgcatgggagcacatttgatcgcggcagcggcagtgtggcctcagtgtccccaataacgacagtggccgcagcgggttcgaccacggaagccgtgacttccttcttcgctacggacgtcgcaggtccctagcaggtgacagaatgtccctccaatcgtactgtcgcgatctctccgtcgactgatagattagcactcacatcgtcgaacagagcgttgacacaggacctggggatcattcttgtgccagtctcgtatgataacatgacagttgcaccagtattccacactcggtctttgtccaaggtcgaagcggacatccagttgccggttgacattcgaggcatcgcttcatgtccgtcaccatcgtggcttcggccgagacagatatgccgagagagatgccgatcccgatgccgagatccgctcacctcggccgaatgcgcgagataggggtcaatctctgcggctcgttgcgatggttcgaagtcgtgagattagccgcactctttccaccagccgtggagtgtgcaggtcgcatatcacgtagatgcgacattattgtcgacaagcgtcaaggtacatcgtagccgaagttttgaactgctagcccagccgtactatgctttcggaaaagacacaatagccgttttgaagcgacccgtgcaagtatataatcccgagaccatcgaccgcctcgccctggatcatctcgaagcggcacaaattcaatcctcctctgtgggaagaaaatcagacaggttgacacttcaacatggcaaactcccggctcgaccttgcagcggaacaggaggacagtctctatgcaacgacgaccactagcacctcgatagacgacctgaaaccccaccctacccattcataccccgcctctcaccatcccggaccccttcattccgacctcaaaaccatcgacgagtatgacatcgccccgatcgatcaaccacccgagatccaagcgatcacggatagagaaccgttccaggtcctcgcgaggcatatctcggggataagtcaagcgggggatggaccggctctggatccgccgccagatggagggtgggaagcctggggggtcgtcatgggagcttggttcgtcctctttgtcggattcggaatcatcacctcgttcggacagtttgccgagtattatatcgtgagtcacaagtgtctcttgcctgtgcataacatatcgaccggaagtgctggtgctgacgaacgattacaacgatcgatagaacaaccaacttgcaaaccacactcgatctgagattgctcggatcgggtcgttttcctgcttttccgtctttttcctctcgatattctccggccgatggttcgatgggcatggagccagggcgatcgtcatctctggcacgatcatctcgacagccgccctcttctgcctggctttctgtaaagtctactaccaattcctcctcgcccacctcctcttcgggatcggctgcgcgtttctgtattccccctgcacggccgtcgtcgcgcattggttcctgaaacgacgggcgacggcagtaggaatcatcctctgcggttccggactaggcggagtcgtctttcctatcatgctctcccgcctgttccccagattgggattcaggaagacggtcctcatcctcgcgggcatggcggggttcttattcttgccctcgtggttcaccgtgagggcgcggcttccaccgaaacagtcgatcccttggaaacacgcaggaaggccgtggaaagagaccaagtacgcggtgtatgtggctggggtggcgttgatctggctcaagtgagtacatggtccggatgacaaacatcggcgggggaagagagattgacaaactgggtctttcggcgcgattatagctactttacgccattcttttttgccaacgatttcgctaccaacaataacgtaccaccacatatcgccacgtacaccgtgaccgtgagttcatggtcgtacgccctgcttccttggtgcatacagctgaccgaccgatgacttacagttcttgcaagccggatctttcttcggacgagccctctcggggccttgtgcagagcggtggggtgccatcgagacgtttgtcgtgagcggggtcttgagcgggatcaccgtcttggcgctctggaccaccgcggcggtggggacggcggggaccatcatcggagcgttcttatacgggctgttcagtggcaagtctcgatgtcggatcgtatcgcccgaccaggacacgagctgatcctgccttgtgcgtacatttgcaggcgccgtcatcgccctcgtagccgcatgctgtgcgcaactctcgcctgtacgagagtttggacttcgtctgggcatgatgtggtccgtcgccgccttgcctctgctggcgggacctcaggtatccgggatcatcatacaaaatgaaggcaaatacacgggtgcctcgatctttaccggggtcagcatcatcgctggatcgttgttgacatttgcgccggtgttttggcgacgatggagagcgaggtcggggaacggcaagcaggtggacgaggaaaagaccagtcgttgaaggctgttcttgcgtgctgttccaggtaacgacccagatcacgacagagacgcccgcttcacgatcgattgaaactactgtatctactaccacccgatgatgacgatttcctttgctattgatttcgattaaaggctacttgatactacaacttggccttgtccgagtgtatcttttcatcgcattcgatcttgtaaccattcaggctggcgtgcatcgccttggccacctcgtagggtttctcttgcatgacctggaaggaaagttgtgggtcaacgtccggtagctaggtggagatgaatatacgtcgaacactccacgtacgagatgcccggctcccttgacaatgacgttctccgctccgggcggcctccaaacgatatcgtgggtccgctcaggtccacccgtgctaaacacccaagacgacagccatgatcagctttggatgactgactggagctggcgactggaccaagacgtacgagctagcgtcctcggccatgacgaacgtgaccttcatgtccttgcgcaactcgctcagcttgtcatacccaaccaacatgcccggtccaccggcaaacaccgtcgcctcggcccacctcggggtcatcaacccgatcgtcccttcgtcctccccctcgacgggcgtgtacgtaaggaacttccgaacgggcccgagacctgattggagcagcgaatcgaacacccgtccgtcccacgctcggaaaaagggtgaacggaggaggtcggatttggccacctcgagtgagggccaggtgtcacgtcgaccgatacacgattggacgagcgtgttggcgactttgccacggattccttgttcctcgggttcgagagaacgggtcattgggtcgatgaggatgagcgagtggaataggtccggatgggcgtgtgacgcctggaccctgcacgccagtgcatcgtatcgaagtaggtatcagaccgtcggatttgaacgtggataatcaagagtcgaacggggcggatgttgggcttacaaggcgttcccaccgatcgaatgacccaccccgacgatcctcctctttcctgcgtccgtctcgtgtcggtaaggcaggaattccggaacctcggccggatccacttcgtcggccgttcgagggagacagttgcgcaggaggacgatcatatccctggcctagatcgtgtgtgccaccgggtgtttcccttgtcagcaacgatgcgtcgctgcggtacggacagggaggagaagggggggaggagcatgactcacgacatcctgccaatcgaataccttgccgatcttgccatcgttgagcaagtacgactcgccgtggttgtacatgtccacgaggatgatctcgtcgaccaggaccgagctcgcgttcggcgacggcgtccacggcgacgtcatcgacgttggtgaagatgtttgtgttgacgtcgatgaccccgaccccgaccccgatcccgacccgtccgacgtagaggaggtggaccgcgataagaggtctatcaagtgaatcaacgtcggtaggtacatctctttatggaacccattggcatgcaggcagacgagcgttgtcctctcggttcccgacgtgaaccggctcgacgtcgatgtcgatgttgatgaggtggcatcgagggtccatcgatcaacagagaggtaatgcatcccccgtcgtcaacgtcctcgtgagtcgaaacagaacgcgtcatgatccaccccccccccccctcacccgatcacgatcaccggatcatttcacccagagaacgtcgagcgtttcacctgccatcacctgctcgccaacagctgctcaaggcttggatctgggcttggcgatgctgaacgtgattaacacccggcaccgaagagggagagatcgggtgggagtgttcactggcgtaccggctgactggctgagtacgagccggaatgtaacggggtctacaaacccagttcatgggttaggatggtcccgttccctcatctcctccttcggttccggatggacgatcagacgagccgagggcgcgttcgtcacctcgcgctcgacttgtggttgatcaaggttcatctgctgatgagttgccttttcgctcatgagcgctcatcatgcagtcgtttatctcgctggcaggttggtggcagtcgcgcagtattgttttcgttcttactgggtgtgatccccaatcggatatggtcactcatctaaaaagtctcgaccagacccctggctcatgctttccagtatcatgcgatcacataggccctactttgacccatggctcgcttggttgtgcttaaaaaactcggttcaagatctgtgggcggccgggatgcaggtaacgtttcccggcgattcggattaggatgtcgattcgcacatcgacgagttggcggagcgggagggcgcttcgtgtcccgtggccgggtggaccacgccttcagggactatttagctagtcgacgcagagatgaccgcgcaggcaggagagggagatgcactcgagcttgaggatgcgcggcacttctccgtccaaccgcagcgaatttcccggacctcctactcgtgccgctcgtcgggattcccatcagagctttcctctcaacccttcacaaaatcgatgttccgtccctctgtgaagtcagtgacctcgccgtccggcgtctccccgtaatttcaactcgcatcgcgcgcctcctctttctatcctcggtcaagccttgcggaaaacccagatctacacttgggtgtcccgcctacatactaatttgatcacgccttgacctatgatccagttcgctgcctggatggaggagtacgagcatggtcgttgctgtatgtggctccaagccgagcgcaaatcgctcgaagctcattttccagcaattagctgccaattccgcagtcttcccattgggtactcttggcaaacgaccttgccacgcagatctcccctttcttttccgctacaagctttgaaaagccacgtccacctcactcagagcgttgtgggccttcccgtatcgtagtcagatagcgttcccagcatctctggaaacgagaccacaagtcaagaattcaccagctgaaaatgcgtcaggactctcctccatcaagctgggagttcaatgatgtatgcttcaagcaaaaacactcgtgtgcttcctagattgatgtgcggatgatcggggtcatacaggcatcgcgacagcatcgaactcgatcgctaagcgcgaccgacgcagaagaccaggcgcgctacaggggcgctcaaacccatttggagggccgatctttcacacccacagccgcagtcgctagagtcgctggaactgacgatgccaccttgtttcagagtgggccttcaagggccttggtcctaaaggcagtccagctatcttggttctcgatcgcctcatgcatatgaactcggctaggatcgagacaccgccccctaattatcgtgcgagcctgacctgagggttcgcctacccagccgtcgataacgaggagcgcgaatattgtctggcagaggatgtagttggtagctctccgccgctatcgtcaaatagacgtctccactatcaacggttctgctagcatggtatcagccccccggcgttcctgcctctggccagacgtgcagcctgccggcaaaagcggaattgtccagccagtattggaaagataatgtgaggagtccgggcctggtcgccggccatgctgcggctccaaactcgactacggccggggttcgaagctcagggttgtagttgtgtaggcttagtttatagattcgatatggaccacaacaccttacaaagtctttttctttttccagtacagctcaagtctgaaataggttgtcccagctgttcatgaaggatggagccaaatttgtagtgtgccaagttttcgacactacggtacttggataccgagcggtgctatctccccttggacgtgagtcattcaaacacttcagaacggttggtcgaattttctcaattggcaggaatataggtcgtgaaacctccactagtttaaagatttgttgttgggttagagaatggatgctgatatgcggaaagcaaacctatgagactttcgcgatgctaccaaattcaacctccaccatatccccaagcctcgcgcgagtcccgttgacctcaccatagtcagtttcgtctccagaaattcctgtttcagctggttggtagacgtgtcttcgcccgggaagaccatgctccactactaaagagaggcagaagaaaaaggtcgaatgcaaatggataataaaatataccattttgttgctaacccactttacatgatggtgatccacgagtctcacctcacccttttgtgttcgtcatatccgcgcgatcgagcggttcgatcctgctcagctagcagctagcgaatatccacaacttcatcgacatgtcggccctgactgctgctgcctaaatgatcattggcagctcattccgaagaccgctgcgacgctcgaatattcggattagtctattgacgagatagtttctagctgcctctcgctgatcgctactggaattgcgacgcatttggcggccgtcggagctcttcgagaggataattatggacggagaaacgccggttcgcagggaccactctgatatcatcgaatcaatgaccgacagcagtaagtagacaagtattcaggtttgagagctaccattgggggtctgctgacatctggctctgctagggccgaacaaacgaccacggctatcagtcgagaatgcagctgaacctttcctagaactcacctcatcagtcccggtgcaaggtgcactgacacaaccccacgagaacagtgaaattggcgtaggcgagattgaggataccttacaagccacacaagatgtcgatatggatctgcagccatcatcacaaccttcggagcgggatggagctctcatcttcaactcgcaggaggagacgttatctgcaaccttgcagaccccaatctcacaaccgacggccagaaagacgactacggatcaatcggcgactccgaatgaaaaattggacgacagtgtagatccgcagatccctccacctgtccagcaggaacagcaaacacaaaaggtggagcaagctgtggaggacgacgacaccgaatatgacgacccctggttcgacgccgcttgcctgacgacgacggatgcagggggaaacatattgccggaccacctgcccgtacctccgtcgagtacgcctgggaagaagcaggatctagagagacgacgatctagcgagatcaagcggagccaagaaggcaaggcaatcagggagacctatatgcgcagtcaggcggccatggcgcccgttatcgaggagaagggcgccgagggccgacgcgtacaatcctcatctgtatcgactttcagttttgggaacggtaggcctgtacctccagtgtccgaggcggccaaagcaaaggcagctcaggtcctggcggaggaccctatggatacgtttggtctaggtcctgccacaaagatggccggcccagaggaggaggattacttttccaccggtttcgcaccagccggttcgtctgcaccgggagaggcggattttgaagcaggaaatgctgcggtgccagcatttgccggctttcagacggggaagggcaagaaattcgctgggccctctgaagcgacaaaggcgaggatcgccaacatgttcgcagaggatctcgatggcctacctgctctggatgacatcttcaaggtacccacccccgggccgtctttcttgaaagagaccttgtctcaaccgaccctgccaggaactggtttggcaactcccaacgctcagaggacaatcgttcctgcattcaacgctccttctgctattgagacgcccaccaaatcgaccgctttcgtgccacacaggtcggtttcagggatgagctcgttccaaacagcatcgggggcaaaggtacctgcggtatcgtctgaagccaaggctagagcactggctctgtttgccgacgagggattaggaccggcggatccaccattagttgcctctccgtccgttgggttttcgacgccggcacctaaagccaaaacgattgcgtccatacaggtgcagcccgatctggttggtccatcggtactcgatgacagtggcgtaacggaatccccagcaatccccgtgcgtcctgaagtcccattcccggaagatccttcaatctcaaccggtccaatgtctttcggcacgcccgaaacacctgtccggtctgaaatccggacaaatgcaatcagacgatctacagacttgattaaggacgtcaccaaccaggccccacagcgatcgccggccccacagctcgagccgttccgctcactcttgacaccgctgccgttagcgaaacaggaactgctcgcccggcctccagcctcaccgctcgcgtctcctcggctaggcattggattgggcatgacacccaggtcaaagtcgacgctgaacaagcgacctgctttcaagacgcccttcaaaccgaactctagctctttcagtacacccacgatgagccggctacccagtagcatcagaacccctggagtctctacggttccgcggcccaacgtcgctaaggccgaaattgtgccagtctttgatctaaaatgtgggtctcgcacactagtaatcgcttagtccagccgactgagcgcactcttacttgaaggtccggtccctaggcagacgatgtctgaagctggattgagaccgcaacaatatagtgcagaggaaatcattaaagtcggctggtaaggaaagagacggaactgcctggacatcatcctctaacatcatctctcttatgacactttgccagtccagaagagatcatcaagatcgacgcaaacaacgcgctattctaccacttcgcggtcggcgacactttgaaaggaccagaagacgcattcaagcagattcaagcggatggatgctcgcagatcgcgctcaaatgggtcaacaaccattgggctctgattctttggaaactcgccagtatcgtcagggcccaaccctcattatgggaacaaaaatggacatatctggaagtactaagacagttgaaatatcggtaggtctggcgtgcgtcttccaattgcgagccggcctcaacatgattctgcatagctacgaacgcgaagtaaatcttgcccaacgttctgcgatcaagaggatgcaggagcaagattcgcctgcttcccttccgatggtgctttgtatcgcatcgattacgccgatccgcaacggacaggcacaaagtggccacgatcagcaaaacagtagccttctagaattgacggatggttggtaccgtatcaaggccaacgcggacattcctcttcaacgagcgatcgaagctggcagattgcgtgtggggtacaagattgcccttgctggagctcgagtgggtctttgagccagtgtaagagctaaaccttgctgatacgtccgaaaacagctcgacgccgctaaagatgggacggatgtacttgatgccctcggaaagtccagccttcgtatcggcggcaactcaacatctctggtgacttgggaacgacggctcggctttagcctcgaacctttcgttgtatcaatgactagtctcacgagagacggaggatcaatcccgttgatggccgtcaagatcaaccgagtctatcctttggcgtacatggcgaaggaaaagggcaaaggctccgctccctggtcagaggcagaagaattccgcttacaggaagaatggacggtgggtttcgtgagcatcgcgtcgcgcttcggggcactgaccactcctgtttctacagcaacgatacaaccaggagcgggagcgtctaagagaggcttgcgatgtcagttcctcttttattcagtaacctcgcagttggctgactcgatgccacagaaacggatgcattcgctcgaagacgatttagaccgcctcaaacagatgtgtgatggcttggaagtgactgctggtgcgttttatcgtcgtctgtcttccctgcgttctccgctcatggttggacccgcagaatccatagacgaagccgacgtcagcgaccagacgctggaagactatcatcaaaccaaccagaaatcatccttccttcgaaatctcagctcagcccagatccttgggttggcccagaaagctcaagaggaatatggatccgaatcgtcaaatggtcaggcagaggtggaggataacctgcgggcgagtcggagttggtgatctgcagcgcgaaggtccagctcaccgattcattctacctgatacagaacctcatgccccctcgcacgacgcgcagcttccaggtcattcgcatggaagacctctttcccaactcacaaggcaaaacacgcactgcccaactccaagtttgggacgcgcaccaactatcgcgaggcatcctcaaggaggctggctattatctcgtctccaatctcgcaccggctcaacctgcatcttggtgcggtgttcaagataccggcgagatttttctatgcacgaaccgcaacacgacctggagacgactagaatgacgaccgcaatgacacctcacgacacaaatacgacgacactgcacgacgggaaccttcagtatatgaacgcaagcgaaggtcattatttggtatgcatatgcaaaagtgtacagacaagggatgtcacaaaacgatctcagtcttcgtcctcagagccggcagcagcgttgccagcctcctcgccatcttcgggacccttcttccttctcttacgcttccgcttcttctgagccccatcattttctcccccaaccttagtggcagtattgacgtccttctcgggatgcgcactcgaaagcccatctttggttccgactacctctgtgggcatcgctctcttcggctgttcttcaatttcctcgtcgtgctctctttcttcctcttctctgaccctcttctttccccggtctttctccgtcttcgcggcttcttgcgcagccaattctttcttgctcaaacgacccgtaggaggcagatctttcttttttcgtgaactgagaggattgggagctttgggccccactttacgtttgcgcatcgtcgtcgagacggcctccaaggactcggacgctccgatgatgttgtcaagcaaaggggcctggtgttcgagttgttccttcaacttggcaccctcaagctgcgtttgtttcgacggatcagtacttgacagagctcgggaacctttctcagtacataccacatccttctgtttcatagtcgcatcgctgggtagctccatgaccaatacacctcggtcattaaagtgagcgataggaactccagggatcatccgtagttgcgatcgaagccgagaattctgtacggccagaatatatcgatgcttgttggtttcgcctggaagtcaagacatctacgagtaagcacagtggtcaaaagagatcggctgtcagacataccgacaacatccttgatacacaagtgctcctcgataggttcacggtgattgcatcgtcgcctctcgaaagttttggccaaattggtcacgtcctgatattccttgcctagcttgtacagtgcttccacagaacattgagtaatcactgggtggatgaagtcgaacagatcaggtcattgcggtcaatggcaaaacgcgaggcggcggcttactgggcttgcattcgccttgaacgcaagtggacaacatctttgccaaatcgatttgtttgttggattgttcaagcaagaagtcttcgccaactatgacagatgtcgcagccaaaaatctatcagcggcgttaccaatagccagtttctccaggactgacctagaacctgaaatggcgacctgaatccgaaattctgcgaatacagattcatgagacgcttgtacgccttggctcgcttttgacgcatcctggaaccgctttaatctgtattgccttgggagagctgcttgctgattggattgatcaatgtccggtgtagacaccgatgagagatattgtaaaccaaagtgtaatcgagctagaaagttgttccaggagccctcggaactgccaacaacccttgagcgagcgagtcacgtgatcgcgcacgataatcatctcatattcggcgctcttgaccgatcgaacgataaacgtggtcacgataatcggcatgaattgtccgtaatctgcataagaagggtgtacaacgttgatatggtaggagcagtggcgtccggtagttacagtagagatccaagcccttctattggagtcgagaagcgtacggggaacagacgagcgcagtgatgcttgagttgggttttccttacaacaagtagtttcagcgtatttagttctttctaggcgggcgggtctgatggtggtacatgtcctgatgtccgacttatgggtgggcttgcaaaggttgctgagcttgaccgagtttcctcttgagcgcgtcgagacgagttctgatcgaggcgatgactgtgcgtgatgagacggggatgtgagctttccgaggtttagcgaaccaaatatctagagcgatgagacttgccattctctaccatgtgacgatccgcatcaccaatctccaatccgtcgtgcaggagtggatccacaacggcatacagaagccagagagcggtctcgtaggcattctcggcggaagggaggtcttctccgaccagttcggttacggctgcggctcgggactgtgtaagagcaagcaaattagtcaagtgcgttcgttggtatgcatgctgaatttctcaccagctcgatggccttgtcgtatatcaacttttccgcgtatgaagctgactccggcatctcttccggcgaacgagacttggtccattccgccttgtcgaaacagtcattaaatcgatgacggaaccattgaatggctgtgaggcgggtcgatatcgtcgataagacaaagttctttggacaccgccaaaggataggttgactcactttcgttgaactcggcgctggtcttgacaacgtccgtgatcgcggcccttcggtcccaatgttgcttggcctgctcgactccgttctgcaagaatgcgagtgacttgaggtacagcaccgtagcctcggcgcacatggtttccatcctggcgatattgatatcggtagacgaggtcgatgcggaagacgagcggcgtcggctcatggcagaatgctgattgttggtgaagtacgagtgcgaattgggagacacgcctaggcccggtccacccgagagaccgcctgaaggtgacaacttgggcggaaacatgcattgcgccaactttgcgtcggcgaattcgtacagagcgtgtgccttttgggccaagtcttcaagcttgcccatcaagagctcttctgctgggtcttcctccttgtaggtcagagacagtctcgcctgacgccaaggtcgcctggaaaggtggccgagcgcattgactgggctacccaagagcttcatcccggcaattcccattgccctagcccaagccgatgaccctggaggcggggattctgcaaagacggcctcgtgagcggtctggtggtatgtcatccctccaccatatgtcgtcacggcgtttgtcgttggacttggcacgagcatcggtcgagatcgcgtggggatgttcggcgaggaggacaacgattgcaaggacggcgcccggtggtgcgaacctggaggcaaagcgaacggtggtgtggtcgaaagcgcgaacggcggcgagtacgaattgggcgaagatcccagaccaccttgagacgcgacgctggtcaaggcggaaacggggcgcccgaggacaccgcccctagagctcctccttcggactaatccgtcgggtcgtttggccgctgcatccagttctgttatagtggagacgaattagccatgctctatgtgcgtacagaaatcctcaagctcaccatcagccaaagcgttgacctcgacggtcttcttttcgacgacgacgtattccgactcctgcatatttccctgagcgctcgccgcccggcccgcttcactagtctccccaatggaagcccggctgacgggcctatccgtagcgttaaaaccctgagcctcttgactgacgggcgaagccgaatcagatgcgttattacgctctggctgtctaaacaaattgcctcgtccgagcgtgctataccttctagcagcggaagttgacggccgtctgaccaaggccacaccctgctctgccggcgatgcgttgatcgctactggccgagcgtgggctggctgtggcaccggcggagcaatttcgatcggtcgtgccgcatggccctccgacgtttgcctcgaacgagccggtataggcccttgcgctcgggacggatcagtagcgtccgacgagacgtaatacctcggctctgaaggtcgacgccgatcttgagagggtgccagatctgtcgacctccttctcgaccgagaatcctgtctcgcaagcgggatcgtagaggaagccggggctttggactcgtgttcgaccgttctgctcgtttccacctgagtcgtcagataaccgtcccagactctgctcgcgaacaagtcttcgaacggcatcctgttctctggattcttcttgagcagccgcctgatcagatccttgatatcctcgtcaacgggcaccccgaccgtctcgccctgcttcaactcgttcggctgcttttcatcggggaacttgatccggtcttctcccttttcgatcctcctcaacagttcgacgtggttttgcgctcggaaaggaggtttccccacagccatctcgaacaggacggcgccgatggaccagagatcgaccttggcgtcgtacttttcgtaccttaggatctcgggagccatatacaagggcgaaccacacagagtctcggccatggtcgctgccggaaggatcctggcgaagccgaaatcggcgaccttgagtacagggatgccgtaagggtggccttgagcgtattcttcctcggacggcggatgtagcaagaggttctgcagcaaggtcattgagcctgctagaccttgctcggaacccaaaaaaaagaaagcgcatcctcacctgcggtttgatatccctatgaatcaggtttctcactctcaagaacttgatcgcctcggctaaacgtagcatcaggtataagcaaagcatgcctcgattcccttgccgagcccgtcgaccacctacttagttgacctaggaagcacctggtcaccaccccatccaatcctccctcttccgggtgtggccagaaccccagctccccgcccgattcctgcgtaggtctcgaaccatcaggcaacaacctggggaaatcgagcgtgggcagacggcctcgtttcttgatatagatcgaaagatccccgccggaacaaaaggccatgatcaggtagatgtgatggtcgttcttctgcgtttgacagaatcgacgagatggggcgaccagggacgccgcatgagcacgatcagcatcgaattcacaagacttcgcctgctcctcccgccccctttcggtcgtaaccggtcccactcacgatacaatcctccagctcgacaatgtgtcgatgactgatcgccttgaggatggaaatctctccctcgaggttctccatcaactttgccgtgagcttggatttggagacggctttgatggcgatgggttgtttcgaccgctgcggacgtcgagcagtcaaattgtgaatcatagtgtgagcaagcttgcccacggtatatcgaaccatgtctagacgtatcgaacgggaatgcatggccgacattgcacagaagactcacgctccggtaccctttataaaccgtagcaaagcttccccttccaatctcgttgccaatcacataattccctatcctctcccgcccactacctcccgacgcagtggaacggtaatctcccgtactctcatctcgattggcgttcgagttcgggttagggatggggagttcatgcccggtagtcgtgctctcacgacgacgagactctctgcctggtcgggaagtccggtcgggggcctgcatcgtagtgctgcaacggggataggatgaggttggtgatgagagtatcctaccgagccagattaatcgttagaggtatatccgagactttgatcgagtcttgaggcaagggaaaggatgagcggtgggtcgcctgtctgatcgattcgcaggcctaggtcggctgatcaggtcaggcggaaaggaagtccagaagtcgaggagctataccaaggaccgggcgacatacgagtccgagaatcaacaaatcatagccagatagacctgatgctactgtccttactgttgttcacgtctgtgaccgagtctatgccttcgtgaccccaatggtgaggtgatggcctcgaggtgtgggtgacgaggacgatgacatggggcgctgcaagggaaatcgcctttgtacgacgctcttcttgaatttcgagtacgcctgattgaaggatggagagaggttgtacgatgaatgcccgatcgatggcgatatggaccaccaccaccattacttgtgacctgacccttgcttgacctcgctctctacgatcatctcgctcatcatcgcctccctcacgtctcgctattgtgccccgattgtgtgatttgattccgaaatgaccggaaacaaatttgattccgaagatcgcgttatctctctccatctcttgtcaacaacccctgagaaaagtgcggggaccccaatccatccgttcgttcattcattttgactatcttgtcaaccgttgtcaaccatgcaacaccatatctgcctatactcttcgcatacatcccatctctaccgctcatcgtccttgccagtagcctcgacgtcttcgtcgtcactctctaccccatttcctcccttcgcctcggctttgaccaccgctacaccctcttgactcgaacccgacgctcctccctcggcagccttgcgagcgttcaacgcggcctgctttttgctcagcttttccttgaccttgatcgtcttcttggcggtctcgggtatctcgccagtacacctgatagcgcgtacaaagggcacagggattatcgagttcagctcgactttcctagccaccacagacggtgctcgtctggcaagacttaccccaaccaacccaacgtgtgatcgaaagtgtgatctacattgttcgcccagctcacatacctatggccgcgtagacgggatcatcatcagcctctactaccacaaacccggcccatgcacccacgccgcgcaaactcacacggccatcttttcctcgtccagcctcaacctctcgtagatccacttgaccttgaagtcttgcatctccttttcgaacggctcgaacgtgatggcctcgtggcccgcagcgctatgtgatacgcgctcgttgtaactcccgaagcggggttgttcgagcaagagtccaagcgcgggggctttggggatgtgtagcccgtctttctctgtacggcatatcgtacacgcagggacaaggggccgggatcgttattgagtcaggtcaggcaggggtggcattggatctgagcgtcaagcgggagcttaccaaacgtcttgggaacgatcgaagccggcgtcttggtcctggtcgcgagtacagccatactgatcattttccgctgcagtttgatcctcgcatctcagcatccttccggtacgagaacgccggcgaggtcgaccccccccctccccccccttgtgcgtgctgggaatgatgggaattaccccaaatcgctcccctgcccacgctcccattcactcagctagctcgacacagagtgaccatgaccatgaccatgaccatgaccacccatcatcatcggtcggacaatcggatcgtaaacgtgctgtagagggacattcatctagatacctgctagatacacttgccgttgaaccgtccataccggctcgcaaatcgaacgtagccaggttcgagagaatcgtcaagatcatctgaccgtccatctagcatcccccgagcttcaaaccgatccaaactgcaaagccgatactcctttcggctgacgaacgttgaggaacggaaactagacgccgattctcgtgataatagcgaaacacacgtatcaggactgaccccactcggatttacaccacactctctcactgtcatcaaccatccgtctttcgaccgcgaaccgaaccgatagtccatactcatacgttcgatcagcatatcgagggaacagctcaaactaggcctaaacgatggcatccggcgacgagctcaaagggttcgatgcgagcaggttgacgagcgaggacgacgatgcgggtgagttccccacccctctcttttcctcacacgttcgtcattctactcgcaaacaagtcgagctgacggaactctacccgaccgaaccttgccgatatctcactcttcgggatacccttttcaccgatcggattcgcaaactcgctaggtcccgccgtcgtacccgagactggagcaggttcggatagcaaagtcaaggtcatcctcggtctcttgaaaaagtcggtcactccccctttctgctttcgtcctgcctagttgcacgaaccaatgactctagaggacaagaacgttgatcatcgaattcggatatgactcttcgtttccaggttgatcggggtttccgatgtcgccaacctgtgagtctagccggggatacacgatgtcgaccataccgtcaccatatgctgagcgttccacctggatagacgtctctccctcccggcgtctctgctcgagccgatccctaacttggaatactggcactacgccgatcgaccggacatctttgctaggtcagtccaccccaaccttgtcatccctttcattaccaccatcgtcgtcgctccccgttttcagtccagctgatatcacgaccaccttaatacttgacgaattatacagtatgggagactcgcccgacgagttggagaggatgttgtccgtcatgcgatatagcttttccaaccagctcaagtttgtcaggtacaagatcggaaagccttacaactctacgctaggtgagtcgccggcggggcttctttcgacttcccccctgggaggcgaggctgacgggcatatgattcatccctcgcaggtgaacactttcagtgcaactggtctctaccgcccgtaacctttgatcccagaacgatggcccccgtgatcaacgcctacaaattcgatcctagcaagaacaatggagaattgatcgcaatgagcgcgatgagcacgcccttggtcgctgccgtcgagacgggcgacgacgtgtgagtctgccggacgaatttcgacctgttccgaccagacgctgacgaggttgatcgatcgtttgttcgatcgtgatgcggtgatacagctcggtcaggtcgctcggttctccatcgcaaacggcagccggcaacaacgggtccaagatcctctcgactccttccaagttgaaactcggccgaggactgacgagcaggtcgtcgagcgagagcgcgagggccaaggatttggaaaaggcagtcgccggaatgtcgattcgggacaaggacgaaaaggtcgatgtgatttacttggtgcgtagatgaccggaacggtcagagcgcttggtccaccgacggctgatcatccggacgatgcagacggaacaagtctcgcaccaccctcctatcagttcggcctattactgttgcccgcaacgaggcgtagaaatgtcctgtgtcgaccagatttcagcaaaggtttctttcccttgtgaggacccgagcgcttcgatgttctgaccaagtcatgggaaaggcaggctgactcgctccccacaccgacaccggcgatgctagctgtacaaatcactcccggttcggccaatcaaggactgtttgtcaagctctcgaacccatcaccgggagcaggcgaggtcagttcgaattcgagtcgatcgctttgcaagcccgcaaccaggagctaaacaaggggcctcgcgcgatattcgacagacgtaccaaatcactcatccgatcgcccaggtcaatggtatcatgcggggacagtactatggaacggcaagtcgcttctctccagcgcttattcacccgggtcaaagctcatccagtgttatccctgttgaaacctcgcagatcagcgacaagacggtcatcacgtgcaccagcgacaagccaggattgagaatgaaggcgatcacagagtacaaggacgaagtgagtcgtgccccgtcagccatggcactggtcatcacgcgacttgccgttgaccgtcatgctcgtctggcccctcgatatagtcctggttgggcaagcccaagtttgccctggagggtgtcgtctgtcaatacgatcccaacaatccagacgaggtcgcgtggaacaagggcaagagcgtgccctctgatcggatattgggacattacgagggttcatggcggaaacagatcaagtggaggcgaaagggagaaaaggtgagccatggtgaacggcctgtcttgttgtgccgaatatggtaggctgaccaggttatctgtgcaaactcgataggaatggcgcgtcgtcatcgatatggacgagctcgacctggttcccaaagacgtacgacccctggaagaacagactgaacgtgagagtcgcaatctgtggagcgcggtgacgggccatatcttgggcaagaattggggcgaggccacacgggaaaagcagatcattgaacaggtcagtcggcatacgcggtccccatgtcaaagcgtcacatcggctttaatattcatcctggattttcctaggcccaacgtgaccgttccaacgagatgaagcgacagggtcaaatgtgagcttcgccgatcaaaactcttggatgagtaccatctgacgtgtcaattacacctcttctcatgcatctaggcatatcccgacctactttgaacaagacatttcttccggtcaacccaagctctccgaacaggggaagcgcacaatccaagaagaactcgcccgagcacgacgaaacgctgcatagccaagatgaatggcatatcctgacctcctagatgatgacgatggatcgcgcttacagtctctataatattcacccctttcactcaagtgatcttgtaattcgaacgaaacgtctacaccttgatcattcattcatgtctagcctcatcacgatccccttttgcagggtacaaatggtcgctcacatgggctttgactgctggtcgtgatcaatttccgaccgcgtcgatctggtccctccagcgtttctggatctcgatcgattcgcggaagatcttgtacttggcgtcgagcaacttgatctccaagggagaggcgtctggagttaccgccttggcttcgggcgtcatctcggcctgggaacgaggagtcagcgggggtcaacctgttgcggcacgtgtcgagcaggtccaatgttcgagacataccatgacgttccacaactcgctctgcatctcggaaccaacgcggccttgctctccctgagtcacaataggcttgccccgtagcttggccgagatgttggccgcacagcgacccatcatggccgcgcccatgacgactgccgctgaggggtgaggagggataaacacggcgacgttgcaaaccgatgcgaggagctgcatcagcggcttattcttggcttgcgaacctgcggcgtcgacgggtatgtcagtcacgcaaaatgagctcccagcgccaattcgcttaccgctcatataaatcgaatccacaacgtgaccctttgcgttcatctcgtccaagatatgtcgagtttgcaaagcgatggcctgcgatacggtgtcattagcgttgccttgagtaccccgactttgacaacatggctcacttcgagcgtgacatggaatttgactgccaggtcgttgactccgctgtccagtgtaagaccggtaatcatacccttcatcttgacgtcagccaagggtgatcggttacctgcgccagacagatccgggattcagtaatcatcgagcgaataggcgctgcattgctgctttaccgtgctgcaaggcaggaaggcgtaagttcaaacatccagcaaagacaggccgtcgagacgactcaccagatccggataaaagtgaaggtgctttgtcaattcggctgacgaaagttgtgatcccttagcttgcggcaatacgcttccgttgacgaggcgcgctcactcgtgctcgagacgcctcgaatccttttcaattcttccagtttgtcctccaaaaagtcgaacaatccctttccgctctctttagcctgggcttgggctttagacaaggccggatgggtgttgatgatgaaatcgatgagctacggcaaggtctagtcgtggtcagcaggtcatgtactgtagatcggtgatgcgcaacggacacgagctcacctgtccagtcgacgactggccgccttcgttcatccaccatccggggaagacggcgttgggataggggccccactatgtccgccgcggtggtcagtctcgtagtgctcctactacccattccgcgtcacactcacaaccctggagaagcatagatagacgtgtcagtcgacctcgtcgatgctatacaatacccgctccgagactcacccatcgacgaacacacccttgtcgctctgccgagatgtgcgatcgcgctcgttcaggccctcgtatatcgcgcacgaccgggtctggacggactgacctgaacgatgtgacacgtcgacgtccctgcgcaagctgccaaccgatgactgctctcttccagcttgagcctctcggtcgacttgtccgtatcggatttggcagcgatggtgcccacccaaccggcgtacctgagtttcatccggcggcccgcaatattctcgttgatcaccatgtctgagtgagatcgctgacatcgactcacgcatcgatgacggcgctcccaaccggggttccgggtaccaggccaaactccttggcagcccgttcggtcaacccgttcccgaccggttgtcctgcggtcatgatcaacccgttcttcccaggttgacccccgacctgttcaaagtctctttccactaacgagccgagacctgtgatgagagatacgaattccccccccctcagggtcaagcgagtcaacgccgagcgtccggacttcgaactaccgatcggacatgggtggacggaggacgtaccgatcttgttcaagaacccgcggctccacccctcgctcgtctcttccttgccgtccaggtgcttcacgttgaccccgggggagacgtacgagaatttacaggtcaacgagcaattgctacgtgcgatcgagtcggtcgctcggtaagtcactgtgacgcagacaggtggtaagggaatgggctgacgttagcccccacgcgaatcgacgtatgatcgcctgggagcgctctcaagcttggaaaggagatggacttgcagaaatcgggtagactgatagtgcgccaaacgtaacgtcatagtcagcctggtaagatcgcgtctggacgagctcgagggcatgggactcgctcgaagaaataagacttttcaaagtctgcctctttcatgtgtttcttcaaccacaaggtcttggggatctccatttcgagctatcagatgtgagcagggagagattcagcgtatcgatgagcgatcctgatcgtcaccgtcgtcaagcattcgaccccccctgttcgcggtactcacgctcatgaccccaccgacgaaccccaagacgccttcccccgtcttgttgatcaacgccgcctcttcctctgcccgatgatccgcccagaggatgacgttcctattccccttttcctccccttcttcccctaatccttccccctcggtcacgcagatggggaccccttgccccgtgagcacgcacagggaacaggtcgcgtcgaacgagacccccaggaccctctctggggggacgcccgagctggcgaggacgcggcgggagcatagggagagggaggaccagatgttctgggtggattgttcaaagatccgatggtccgtctctgagcggtaagtttgggtgttttctacgtgtcaagattcaaggttagggttagggttagggtcagggtcagggtcagggtggggggaggtacggcgaggtgatcgcggatcgtcatcccgagtcgacgacgacgacgacgacgacgacgacgacgacgacgacgacgacgacgacgagccggggtggagcttaccggtagcatcggcaatgatcttgcccgtcgagtcgaggagagcagctcgagccgacccagttccgctgtgaacgacatcacatggagctcgttcttgtcagctgtcaacttttttcccggggggaaccaggttgacctgtcccggcggtcgggctccacttacacgtcgaacccgatgtaataagattcttctccgctcatggtaagagagacttgtgtgtttctcaacggagttttaagctggcaaagtaggttcaagagagtctttggtaggagctgagaagtgacttgatggtcgacctaagacgattgcttgtgaccaagtggtcgtgacgttggagtgaagtgacatgagggttgaatggatgggatgatgtgatgtgatgtctccccttcggccggtcgtcgccggatcactctcgcgcgcgcggaaatttcccctcgattacgccgagacaaggcgggggaaggggagggagagggacgtgagtgtgtttcatcatcgacacactcttgatcaaatcagcacatcgctcctggtttgaaacatcagagaccccacttgggaaaatgagggcagtctgggatcatcgagaagatttccaggatgtctgcaataggaaaggatgttgtttggagtgaggggagcgcatcacgagactcggctgtctttgtccgtttcatgaaaaaggtggaggcagtatgtggcaatgctgttattgcagggcggtgccaccactctgaagcaagtccccctgctgttggccagagttgccgtcccccatggactacatgctggaggtgctggcctgttgatgacatctggcgacgagatagttcactatcgatcgcatccttcctggcatttttctccatcctttgacccgtttgtttccccaactcggatccgtccgttgatggaatgtttcgatcccaatccatcaaaccatcaccatcaatccatcaaatctcgctcggatccgtcggaagggaatcgaatcatcctttctaggcaattcaggacagcgtcgatctctgcgtaaaagtcttgccatgtcatattgcctcggatgcctgatgtcaacgaccgagtcaatgaatattagacacccaaaagatcgaggatgatcgtacacttcgacacttcaagccactatccaggacccgggtgaatctcgtacgctgggtccggtggtgaccgaggaagaaaatcgttgcacagcacatagccgcctcatcctattgcaccgctccgtcgccatcgtcacctgcaacaatccaactctctttcgacaagatatatagctagtaacactcagagtctctagacaaggtgactaattccaactccccgctttccctcatcaactagaactgctcctatcgatttccatagtggagaccccaaccgactgaccgatatcgatatcgactccggcccgacagcccgacatcacctcgaaagatgggtctaccatggtcacactggaatcaagtccccgtaccgagattccagtcggacccgttggaatcttcaacgttctaccacccgaccttgctcagacgggtcgtcaaggtcagtaccggctcattcactgcattcgagacctttcccgcgggtcctcggtcgaggtcctggccgaggtcggtctgtgataatgacaggtcactgattgggacgatcacaggactatgtggaagaggctaccaactactcgcctgaattcgccggggaagaacagttgcaagcgatcgctcagtattgtcaagcgccgtgagtccgtccatcctgcttcttaccatacccacccgcccgatcgtctgggattccctgtgtgttttgatattgtgagatgcgggacggatgactgatccgggtcggcatggaatatgtacggtgcagagagctattggacatcatcctggatgtattgagggaacgaatgacgtgcgtctggccctggaacatcaaggtccgtacgtccacttccacctcgaacgactctggacgctcctcctgatccccatgccgtggacggaccgagcagtccttagacgtcctcctctaccttttacagaacgggctacacctcccgcgctctcaatcgagatcacagcagatcctcaagatcctcaccgacctctccctccgaccgaccgacgacccggaggggactgccgagcacgtcaaaagtaaagccgacgaatgcttggttagcgctggctacctccccgcggacccgatgagcgccagggcggggggtcggggtcatgtgcagcaggaaaatggcgggttttgggggttcagttggggtcggacgagagatcgggacagggacaaggaaaaaggaaagtcgaatcatgtcaagaagcagagagattggcaaggccggcaacctccgtatcaacaacaacaaccacgacaagaacgcacggccccgctgcctgactcgagctcggcctggctgggactggacagcccgagaactcggaagctgggtcctacgagcaagagcaccgataaaccgtaggtccgtcgctgcgttcgcgcgcgaggtcttggctaatacgcaaaagtctcggagatcaggaccgagtcggcctgggtgacgccgctcaaagacggcaaggggttctcattcactacgacgaccgtgaccgaggggtgagttttcaaaatacccgtataccgggaacacgacctgacctccgggctgacctcggctgcgttgaccgacgatagacctccttcggcggatcatttcgagcaacatcagacgaatcacgcttcactgctcgaagagacgttgcgaaagaggcgatagcccttcttccgagtcatcctgtccacgcacgtaccgtctgacttcgaatttcgcttccgacccacagcggcgtctcattgttgtttcgtaacacccaagcaatgtccatggaccacctatcggtcatagtgtttcctatgcctgactctggcagaacgcatcgatacaagtcattcacgtcgatcggtatcactatcttagttacatctagttggcagccttgcccgcgatcacgctccaggggtggtcgatcttgccagtctggatggcttgaatacgatcgaggacggcctgggcaatgttacccaaaccggaaggtcccacagggacgggaatgtcggtcccctcgtatccgattctggtgatgagaataacatgagtaaacgtttgcacggggcagggacacgacggtggcatgcggtcgacccacttgttgacggcgctgacgatggcagcggtaccacttccaaagacctccttgagcttgccctgcttctggtactcgaccaactgaggcatagtcatgtgcttttcagagatgacaaagttggattcggggagaccctcgacctggacctgaccggcggcatgttcccgacagatggtcaagacactgtgagtggaaatgcaagcagatttcagccgatggtcaccgcccatcgtaaagccaaccagacgacgcacctatccctggtcacaccgggcaagatcaagtcctcgagaggcggggtgatgagctctgtctctcccttttcgttctcgatgacgacaaagaggttcatcgttccgacctgggttgaccgagggctcgtatcaggttcggcatcacaaagtcgatgtaggcttccgcgtgactcacctcggtcaggtagtgctcgggaccgtgcaaccacaagttctgagcgtaaccctgcttggcagcctcgagctggggcatgacgcctggcgagtagctgaggagatgagacaggtcatacgtcagacgtgctatcgtcttgcgtcggatgatttcgggccgaggacctacttggctccgagcttgaaagatccggtacctcctcgcgacgctcgcacgtacttggtcgtggcttgcagcgagacgggcttgaaaccggctgcgtgagcaaagaggagagcggtgtgatcagatcagtacatcgagatcagattgaccgctgttcgggtgtcgggaccgggatcaactgactggcatagtagggcccgacctgtcgtgtccattgaacgacgacgtacgaccaagacgatcaacaactcgctccccgtatcatcgagcgttgcgacttacgggcgaacagatgacaaacagcttggcgtccgaactaggatggacgcccaaagcgctctgcgtaccgatcaaggtcggtcctgcgaatcgtcgacgagtccacaccctgtcttgagcgacgatgtataaagaggaaaaagcgacccgctcgggaggactcacggatatacaacgaataaccgggttcaccggggatccatcgagagtcgagcaagacgagctttttgatcagttccgtcaactgttcaccgtcaaacgtgggcaaggcgattctcgcagcggtctgattcacacgcgtcgagaaacggcgtgtgagcgtcttgatctgtgcggaccaccgttcaggagaaaacacgcccggactgaccctgttcattcggtgcatgttcatatccggtcgaaagagccggatcgtcccatcctcgcatcgataagccttcataccctcaaagctatccgatcgcgtgcatgagcatgagcaccgggcgtgagctgactagtaatggacgatcgaacgggacgacggtacgaaacttcgacttacagacaaaaggcatagtggaagacgacggaagaagggtccaaactcaggggtccgtctatatgatccgatcacgtgccacgtgcacggatgagcctttcccgttcctgcatctgcacactcggcaccccgctgcggactcacacgtctcgatcttgggctcggcccacccggtattgctattccaatccacggtcaacatgtgatccgtaaacgtctttccaaagaccaatttcgaggggggcagtggggtcttgggagtcgcgctattctcaatcttgacgagggatgcctgaaagacgagcgccgacgatccgagggtcagtgagatctgacatgggtatggggtatggcgcgcgcgcgaggacctacgtcgaggtcgggaagactgatgacttcccccgtcatcgggtcctgcctgaccgcgcctgccagggtcgatttcgtcctgacggcgttgacggcggcctggacggatccgatcgaggttgatgctggtcgagcgccagaggagaggagcgaggcgggggcggtaggggtgttgtgaccgacggtggtgctaccactggtagccaggggggcgaggcgggagacgaggggcatggcgttgacatcggcaatgttacccaatcgaggtggggtcgaggtggagatgaattcggtcggcccggggagtttcgcagatgccagtcgaagtgctataccgagcgggacgacggggtgttcgatttcaatgacgacgtggatgataggggccgagccttcggtacgtaccttctttagcaatctcttcccggatcccgcccccaccgacctcgaagacgaccttgccgtgtggtaccctgatccacccgaaaaggacgagacgcgaggacggaccgacacacacacacacacacacacacacactcgtcagctaacccctcgacctcgcccgacgcttcccgtccgtcctttttttgacactgaccgacaagcccaatactcgaacgctccttttcccttacccatcctcgtctcattccccttgacgcagacgggtacgtcggggaagacgcgcatccagcactcggcccccttgacggccttgatctttcgtttgacggcgacttcggcggaggagagttgtttcgccgtgagacggaccgaggagaggagacggagaccgtatgtccccagctggagggtggttcctttggtagacccgcccgtaggaagctgtcgggtgggtaaaaaaagataggcgggagaagaggatgagggaaaaggttcggctcgactcggggacgttgtactgtgagacccgacgagtgatactcacggcgaccctgcccttgtgagctttcctatacttggttcttcgaggagccaactgggatctgaacctctgttgttgctgttgcataccgagctgccatgacgcgggcgagtgttgagcggataacgagagggtaggtcgactggcggggaggagatggttggctcggatgacggaggatcgagccgagttgaggctcgatgtgaggcctgatctgagcatttttgccgagtttaacaagcgaactatgatgtgatctatctcgatgtcaggtcgaggtcgatgtcgaggtcgaggtggtggtggtggtagatcatgacatgcatgacttgtatgactgggtaggtgctgactaggtcggggagcgaaatcatcgagacactctggggcgacgcgcaaccaaacgaccccacgacgaggggaaaaccaccaacttacccactggaccagaccactcgatcacctacatgatgatgatggatgtctacctacttttacaatcactacaccgctgtcgtcgcacacagtatcatagccgacacgacacacagctagtcatgtccgcagcttcactcccgaaaggtacagttcccgacctagacctagaatcacgcccacgagacctcgaccgctcagacgaccttcttttccctccttgacttttaaccagggttacaccatctcgagagcaatctgcctcataaattcgttagcaggtcagtgtcatcgaccgatttctcgacctccatcatcccgccacttgatggttgcaccccagtgcttctccgctgcaccttcctgcctctctgtcgtacccgaacctgacactctcctctccacccatagattctccccgagggtcttgcaccagaaaaagtttgtccagcctagcgaccggatagccaggtggaacatccgtcagggagactatgtccgtcttaccgtcgggaaagccgaggacaagtacgtcaatggcaaggacgacaaggacggttggaaggtccatcaagtcacgcagatcgatctcgagaggaacgtcctcaggctgaacggcgttaccgtaagtatatcgagtcggagccgacttttgacccgcaagcttcccggccaggacttccgactgacaaacccccctaacgcccgcgtaagggggaggcgggcggggcagagagaagggagagacgggcgacgcgaattttgatttcgaaatgaaatcgagctaggagagaggtgattttgggaatatatttcccgagcgcgacgtcaccgagagccgaacgcgaccaagccaaaacgagagggtcaaggtggaaaccaatctcgaacgcccgtccatacgaccctcgcggcgcttcaatgtcacggccatgtaaccgcctgtatcggagagttccttgtcgtttcatatggagcagcgtccgaacgagcggaccatgttgagcctgaacgccttttcggcaggcgcgaattcatctttccggatgatgtcccgtcccggttgaagaggatggataccctcgtctcaggatgatgaggcgatgcaagctgcagccaagttccgttgttgtgtatttaacacggggcttgatgacgcttgtcggtcctaaacagacagcccgtaccgttgtgtatcggcatatctctaccttccttgtcgtcttgtcgttgggatccgccaagaggtcgttcgtcatctttctcgttctcgttgtgcaaacacgcgcgcagctcgcgaaagacgtttacgtatcacgaagtgcgtgacgacttgcagttgcgactcggaactctgacgaccataacattgcatcacgagatccttcaatacagatcagacctagtcccaaccacaccctcctctgtatttcatcacgagcacgtcgtcccggatgtctctcccccgtctgatcttccagcatcgaccggcactgtcaatacgactagctcgtccgacccggtccttccacccgacccggacgggcaggaaaaacgttctcgcccgttacgccgtccctgcctcttggccctcggttctcgaaaagctcgtgaagaaccacagcgacggcaagaccgaggttgacgacgatatccgcgccaccgatggtgagcccgatggtaccggtgcaggtgcaggtagaggaggaaacacgttcggatcgtcagctacgaacccggtgatcgcttccatccaggacataccctcatccgaatccatctctcctttgaattcgacatcgactacgaaaggcggggtcctgtctgaacgggatttgaagcgggagatgaccagcgagatgactgccgtccctgccatgtcggccaaaaccacgcacgacgatgaccaggtcaaaggcaatggggccaagcaagcaggcacgatggaccggacgacaccgatggaagtagccggggtgatcgtaccccctaaacctaaaccaccgggggaggaaggtgagtcgcctccccgtcgcatacggtaggcaacagagatgggctgatcacgagtgccgaatgtcttcgtttggatggtttgcgatgcgatgcggggttggacacagaatgttgcatgtctggctgtgtggtgagtctttcggtctttatggaacactcgctctccctctccctcttgctcggctgaccctgcgtctacgccgcatgatcaacgcctgtccgctctcctcgatcatatcactcgacacgccagaattgcgtctacacggtctacaccgacgatacactcgaatacaacgagtctgttcgggaagccatcctcgcgctccgttcgtcccacgtgccccgttcggaatggccagaagagatcgccgagaaggcgggcgacggcacggatgggcaagatggtggagagtcgagagaacaagtcggcaagagggtcttggaaggattagatccgagtctgagggctttcttggagtgagtcacggagtcgattcccctggtagcgggaaaagaagagagtagttttttccttcagaaggctgacccggcttgaacgttacatggggcgataggatggaggcgaggttgaaggccaagaagaacaaggtctaacaccttctaatcttggaggaattaaatcggcgggcgccgctttatctgcggaccttctgcttcaggccgggcggtccttgggttcatctagacgaatgactggctagctagtcgagagagtctggatcacaggccgataatttcgactgagcgagtgaagcggccgtgcgtaaagcttccgaccgtttacacctcagcacgatcctcgaagaatcctgctgtcgggcgcgatcaacagatggacgaaagattgttggtcgccggacagggctcttcaacccgcaagtcctttcagcgcgcctgtgacgatgagcctcttttttcgtttcatttgcgtgcgcaaaatcgccatttaacacggatgaaaatggcgaagtgatacgtgtcaagccgaagtcagtcccacttccgtttgtgatatggatacgattgagacctgaacggttacgctcttcaccgtaacaacacagctagctgcgagcgtcatcatccagctattcgccagattcgatacggcttaagaccaggaacaaacaccccatacgggctgcacgctttgatcgccgatacatagtcgcaccagccgagtgtaacgcactagaattgtactcgcgtctcacttgtaattatgctccttctggagcgtactatattatctggattttacgttgtgtattttgaggtggtcataactgcgccgtgtgcctgtacagccgttcaatctgagtgcaggggtttcaaggtccaattggaacacgattgacgcagcagagcaaagcactacagctgtcatgcgctgtcgagtgtacacggcggctattgttggcatatagtatttgccatcgatacatcgtgcgtagagtgttgctgatatatagatatccagactcgcacctcagcgcctcgaatcaggacgcctaccactcgacctgtcgccatgacccggtccattcatggcaggtcctccgcccggtgggcctccgtatcgaccaggaggaccagtctcccggggattcggctcgaattgacctcgggacacattccggtcattttcgacatggggaggtgggaattgactagttgcagatcgaccttgaacgggagtggcattggccgacgatctcgaaggatcgatagggggtcctctttcgaatcgcgcaggagggctacgaaactgaggcgggttaggcggaaacccgggctgacaaaccgatgaagcttttgtttagtttcgggagcatagtacgatccggaagagggaactcacccctggactaggtggtcccgccggtacacccagaacttgagctcgcgacgggtgcacgaatggtagagccctaaccggaggctgagtggaagctggcggtggcggaactcgctcgtcgcgaggtcctgcctggagccgcgcgtcggcaggttgatctcgtcgttgaacctggtcgggacctctgcgtacttcaggaggacccctattcgccagaggccttgaaagctaagcacaagcaggaaaaaaaagtcagtagattgtagcaccgcttgttatcttcgggttgacctacatgaggcggtgacctccggccggaacggtcatcttctacaagtcgtgcatgccggagctgatgcccgtcctgaacctcaacttgaggtctcgaattcctgcgatcaggttcgtattgtctaggaggcatgtgtatgtcctggcgcgactgagaccggccgaaatcgggtcgttcgctgggtcttccagggactcgatcgcgatctcctcgaccagcatctctgttgtacgccgtagcagctgggggtcgtcgaacctcgtcgtcggaaaggggccgtccgtcacgtggcggcaagggcattccagtctgaagccacaacggtcattgatcagccgttttccgccaggcgactcaagttgagcgatacttacttcacgatgaggaggcgggtctcgggcagaagaagagccccggccagagcttagtctatcagcgcttgggtccggccccggtctgtagtaatcgcctcggcggccggcaaaagcacgatcgtcgtctcggccgctggcacccagagccggtgccgcgaagcctgacggagcggctacactctttcagacagaaacatgccggaatcgcatcaatatcgccgatcgcttcgatagaccgatgagctaagaacataccctttcgggcattcgatcccttctctcgctcggtcgatccctgcttggcgcggcttcggaagccggcgctccaaaagtcctcatattggtcgaaatagcattcactccgctcaggaaggacggttgatttgatctccggggttcttgatctggatgaaagagatcgaaatagatgggtaagggtcccatgttccttgtcaacggcagaaaaggcgcgatcggtcgaaaacgccactgcagctctggtcactgcccaacttcggttgtgctcgtataaaagcttatcttggttggaatatagctgcactccagcccgacatcggcatggcctcaaacatgcgggcctttagggacgggcggcttgtccagtcggcatgacggcacctcgcagcgactgctactataatcctgcactttatcgagcggttttacggctggccggtgcgagacggtcgagggcagcagaccagagcggcaggcaagatagtagaccgaaagaccgggatcaagaacgtacgtctgctgtgttcgtcacgtctgtatatgccaggggatacgccgtccgctcgagtctcggccggcaacgacaaagccgtacgagtgggcggcggctggtcctgcccccaatggcctgaggcgcgggtagcctggtcgcgaatgtcaggatgctccaaacgtaatcgcttggtcgaaccacgatcgtcaggcagatcgtctggctgctcccttcgtctactctctccgacgctcgatcgaggagcaagaggtagctccgacctcgtggctgccggacggttaagttcgctaatatcatccctcgcaggccggctggcacgacctgaagtgccgtttcggcgatcttgccctggccaatcttgtcgggtctgtcgaccacgtctaccgtttcgggtcttcggaccgcttgagccgccattcctgcgatcggagacgtcggtatactgcctagagcgttccccgtctcgttgcgctggcaaatcagtctccaaacgagcgggcgacgtagattcatcgggtttggggtcatctgtcacgacagacgcgtcgccttcctgtactgctgatcctgtgaccgaagtgacggtctctgctgtgatttccttaccatcctcgctcgggcggctgtcttgaagtcgctggcgagcttcgccttcctggccgggaatggccgcgaccataggaagatcttgtgtcggcataggcggggtctccggctcgatctctaccggcatcggtcgagaccacgagaccactttcgtgacgatattgaagaagtaacttttgttagggtcttttcgcgacgtcttgacgacccagtcgggaggtaaaggggtttctgaagttggggaaggagtgctcgcgtcctctgcctgcgcctgatcgtgacggcgacttgttaaccttgagctcaactgaagatgcgcgtggctcaatatcgacttgcagtttgggcctgctcattctcgttctcaagctggagcttcctgcctattgacagatgttccgcgatactgaataagcctgagtcgcttcaatgcaaaaatgtgtcgcttcaactgacttggttcttccggctctgtttcgagattggtgactggctcttgattctccttatgctcgaccgttccgtcctcctcactcttaggaggcggggcagagccagcctgccaagggtcaaagtcgtcctccataccccaatcgacttcggcgtccatcttagatcgagctgtagtccagaagcgtctgccttggcggtcgagtcttcgccgcagtcaaaatagtcaagatttcgatgcagcgctgtctgaaaggctagatcgttcgtgctaactagatgttttggggacaactccgatacttggctctatgagttaaaggtacttcacatcaagtgggagactcggcttggtcgagcgatgacgacttatcaatcaaatcgcatcaatgggttttgatgacgtggcatattcgagattggtatttttacctgaaactgctaagtcgtatcctaaatcgtaaagctgcgctcgagccatcatgtcgcttccaacgctcagatttaggtattgcttggctgagcttctgaaacgccgacggagatgagtgcgcatggagtttctttataaatggcgatattgaaaaagaggatgccttcaggcagattcatagcggtaggttcctgcaagtcccagccatgaaacgtcccgtaggcaagatggctggcgcgaacatttggtctagccttcaaagtatcgtgcaaccacactgcagaacggagttttggagctggctcgatagatctagcaaggttggatgccttctcagagtgtgacctcgctcacccaaagattttgacagaatgcgaacccctcggcggcgggaactgccactcgatgattgtctttgtgtcccctatgccatgaaaaacgtttggctgatcgtccggtagagtattcaagagatatacaatgatcttgtcggcaagctgcgtgattgctgatggtcgcagcattgatgtcgagatcacgtactaggacgtgtcgatagcacgatccttagtcagactcggtgcaccggtttcttcgacgttcaatgcgtctgataatgtcctgaattcttttcaaatctggcctttctgtttcatttgtgctcttacaacgatactttgtggcgtcttccgtttctgttgttctacaactttgccttggccttgccctccaatgcctcctgcctgtccctgattctcttgctcctttcgctgagcataggtacacgtttcaactcggctcgcccgatctgcaacatgtgtacctcgtccggtcccttttgaatgagcaaaaggtctcagtggccggtctaagctaccatgcaacagagccttcgaactcacgtcagcataacgaagcgtcctcagcccggcgaacatctgtgccaacggctgatcctgacagattccttcggctccaaaggcctgcatagaacgatcgagcaccttgagcgccatcgtcgggaccgtgaactgagcataggtaccgattcaacaggacatcagcctccgcggtctgcagacttcactttggcgagccatcgactgaccttggcgattccgatatctttcatagctcccttggctcgggcgatatcaatcctgtgggcggcggtcagcacgagcaacctcgaggcgtcgatttcggatctcgacttggcaatgtcgccgacgatcgtgccgtgttccttgagcatctttccaaacgtctttcgcttgggatccgacacgcgttcgagcatcatgttgagcgcacgttcggctgttccgatagatcgcatgcagtggtggatacgaccgggtccgagtcgaccttggatgatctgtctcgggtcacgagggtgttagaccggagcatatcaccgagacatcctcctagctcacctcgaatccacgtccccaaccgccaacaagacactccttctcgtttaacctgacattgtcgtacaagacctcgcagtgtccctctggtgcgtcgtcgtatccaaacacctgcatgggtcggacgaccttgacgctcggatgatcggccgggatcaggacgatcgtgaacctcttgtgcgggttcgggttctcggggtcggagagaccgatcaagatatggatggcatttcgaggatcaccggcacccgagatccactgtggaagagagcatggcgtcagcgtctctctcacacccgaacctagtgatggtcggcccgtctgccagacccgatcaaagcactcacccatttcctaccggtcacgatgacctctccattcttcctctcgatcttggtggccaagttggtagcgtccgaactggcgatcccgaattcggtcatggcgaacgaactcctaatctttccgtccaataggggcaagaggtatttcttttgttgttccgggttggcgtaacgagcgaggacttccatgttaccggtatcaggagcagcacagttcgtagcctgaggacaaatcagaggagcgtggcccatgatctcggccatgacggcgtactgccggtacgagcgagcgagagtgaagtcagctgactgcaagctcgtagtcctggcgacacgtcgtcactcacttccaagttggtcagatcaacaccgtgttcagggtagtgtaatttgctcaagaacaagttccaaagtcctctcgacttggccttgcgtttgagctcttcgatgacgggagggatgaccttccatctctgcacggggtcgtgagggatctgagcatggtaaaggtgctcggcaggcaagcattcggtctcgagaaagtcgatcaggttctcaagcgtctttttggcaaagttggagaagcggggttcgatctgtagcgcacaaagaagttgggatacgattgaactcgaggtcgggcgtcgacgccacgacgaagcaacgccgagagactcaccaaggaccaagccgactcgccaatgtaggcggtgacggggtgagagggagattcgtgggacatggtgttgttgtttcagtgagtctttgtattcgttttgctggcgatgggtgatgtcgtctatactgatatgggtctactcgtatcaaagttgtcgactgctgcttgtctatatgtgcgagagctcaagcttggctgatcccggttacttgcttcgccacgggcggaacaaacaccatacccgaggtggatccaacgggagtcacgtgaggccccccccccccccgatctcggctccggatgttttcgtgtttctgcttacgtacttcaaactcgctatgggtttttgggaggagcaacgtacctacacacccaccctaattgacagtcgaggctagtagagaccatcaccgatctgtcagaccattcacatacacagctcaaacgatctcttcacttgcccatacctggaaacagtagacaaccacctctcaatatgtgagtcgctcgacgcgcgaggaagcgacttcggcctacgtgcactagctaaaccaatgccttctttcaatgctccttgtagggatatgaacaacttgaacccggccgaagccgcccacatgaacaaggtgcgtcaaatccttcaatgtaatgcctttcctttccctttgtacattgctgatcacctcgtctcgcttgttcgctcatcagatcatcgagaagaagcagatgcaagactttatgaagctctactcggggctcgtcgagcgatgctttaacacgtgcatcaccgactttactagcaaggctttgaccggacgggaggtgcgttcgatctggatgccggcagctttgattggcaacggttgcgatggcacatcgaagtagatgctgatctctgtctcgtcttacagtccacctgcacgaccaactgtgtagacaagttcatgaagcacagtgaacgagtaggagctaggttcgccgagcagaacgccggtgagtataagtatcctcgcttacggggtacaagcgaccgatctgacttttactctgcgcgatctagctcaaatgcaaggaaagtgaggatccagcgtggaaccatgaacgaaatatatatatcatgacgaagagacgccctgggtgacgagatcagaaaaaagaacaaacagccggacagaccacagccggaaaaaatctccattgcgagctcagactctcttgtatccctctcgcacatctcatcttatcgaatacacaccgaatcggtttgagccaagtcctggcgtcggatttcagtagaccaatcatcgcccccgatttgactctacctcgaagatccactttccgatcacccattccccgagagccgtcttttttctcgaatccagttgctccccccgggatgttagatcctgcacgaggtcagaacccgagtcgcagggatagaaatcggcccgacctgaaatcttctgatcaggatcgacgagtaggagtagagtcgggaggaacatgttggcctcgatgtgctttatcgaccggattcaaaaattcagacagcgtgatcagccgaacctctcataatctcgcatacgaaacgagctcggaactgaccatctgggcccatggcagcgcatcgaatggctcttgtagcgtttccggaaactcaaaccattcgggacgcatctcctctgtactaatcaacgatcgaatgaaaccccagtcaggatggatcgatcttcaagatacgcgcctctgtcggtactcactcgaatggtactcccgtccacgattcgcaggtatatacccagaccttgaccgcgtgatcgccgccttcccgtatgagagcattctttgagtagtatattagggtacctctttcgatcagtccttcagggatgataccggactcctcctgaagatgaaagaatcgtgcgacgcggagattcagctcgtgcgacgagatggtcatcgcgaggtttggcccacagtgagttccctcgcagcgcattcagccatatcttcgccttcctcgggtttgccgccaaagccgttccatctgcgaggttcagaagaggatacgagcgcggtcggtgtttgtaggtgggacgccaggacatgtgtgtggtcccgaatcagtggtagctcggcgacgagaagaaatagccggtctcgtacatcccctgcgcgaacccccgtttcttgagccctaggaggacctgaggggatgaggaatacacatatgatcagatttagtagatatatcgccactatccatgccttaccttctgattggctctatcgatgggaaagaccagactatagtccttgatcgccggcacgtctagccattctctcggaacagggtaagatccctcggcgatcacgccggacatctgagttggattagaaggtccggttacgaaagatttgctcaagagacggcaacttcgtacccgtagcctttggccatgtgatcatccagcagatgtttaaggaaacgggttattcaaactaagtacagtaggtattttgatgaaatggtggttagtctagttagcttctgatcggaagcagactttcggaagtaaatctagaaattatcccatattcaccgaatcgctctgggactaagggtgacaacctgagattcttcttggacttggttctttgagctgccctgactcgcagaacagtcctggataataggggaaatccagttcttacgtcaagacaacttttcaccatgccaccccgacagcagcctcggggcgagcctccctcgaaaccactggtcccacatccatcgctacccgtcaaccccatgacgtatcgtgcacctgtctcgacggcaccggcctatgtccagatgcaagcaacccagggcctcccggcgatgccaggttttgttcaacaggcgcccgtgatgtacgcccctacaggtatgcccatgtccgggtacatgcagcctcagggacactacaacccagccatggctttccgtcaggccattttccaacgacccgtctatggcgtacccacccagacggccgaaggatattcgtattcggctacgtaccttcagcagcaacagcagcagcaacaagctcaacagtttcaacctaggcctcaaccggtcgcgacgagctctaaagtggttctaccgaccagcaacgactcggagccatcccgaccgaacaaacgagcccgaccgaaccctccctcaaagcctgaacctaccgacgccgctacctcgactcctggcacggcgctcccgactcggaccaagatcccactccgaaagggtcaatcggaagcgtctcagggattctggcgaaattgcagctcgtccggctgtacctacgtcgggccggacaaggaggtgactgttcacgaacaagatcggcatttgatcttcaagaacaaggaaacccccccgggaaaagcccacgatgaggacgaggaagaggctgcgaggaaggctggagggtgagtttgacccgtgatggctctgcactcgaccccggatgatctcgcctgactctcgaaaaaaacaaacccccgatggggaatagccctcgacctgccatccctggaacgtcaatcagattggagacggaggaagatatcgctcgatggatcgccgagcgaaaagctcgctggccgacatcttcccgagtagcccaaaaggtaagccctggacgttactctcgcgctcggcaccccgaccgttcctcggccgctcgtggtcgcaaccgagctcacgcgcttcgactctcgctgacttgtcccctgattctacgtcgacgttgcctcgaaccgacccgttcacttgctcggatccaccgcgatcctcaggaaaaagaacggcaagaaaagatcgaccgcggggaattagacccctccgccgattcgcgtgggaatggccgtggggatcgcggacggggacgtggtcgtggacgtgaacgaggccggggtggacagagaggtggagctagaggtcagagcgcgaggggtagggatagtggatatggaggtagggtgggaacgagggctgggacaggggctgaggatgcgacggaggatatgggcggggtcgagtcggacgcagcctctagtgatgggaccagtagctcggagagagatgacgaggagcaggatgatgaccacaaggacgagacaggtatcgaccggggaaacggtggcgtcgaagatgacgaagacgacgcccctcccgagtcgcacgatgtccgaacccgagtcgccgccatcgctcactcccaccccgactccgacttgtccgactccatcgtcaccccgtcgtcgggccatcgagtggcctgtcgatcgtttgctcggacgggcaagtgcaagtttggttcaaagtgtcggtatgaacatgtggtcagtctcgtttttgcccggcggtttccccttgttgcggggaatgaatgcactgacgatgccggcggatgtttccttttgatacgaccagccgaatgacaagcaagaccgtaaggatcacgaaacggaacgagaaccgacacctcgagggcctgtcaatccgtttgcccgtcccagtctgctcggcgccgtgagtcccctctctgctcggactaaaagtgcctcgtacccgatctcgagatgctcacaccgaggaaaacgctcggtttgatctgtctcgccctcgtcctcagatgctggaacgacccatgcgtcagaccctgttgacgctgacggaagcgatcgatttcatcgtcgacaacgatttctttgatggggtcgagttggtaccggggcaggccgaggagatgaacaaggcgttgaataggatcacagaggtcgatgagggagcgacggtcgagcgggtagatgggtgatggtgatcccgttccgcagtctagtaggtgatcgatcatgatcttatgaaacatgtcaagcgacggcggccgatcgtagtctactagtcgactaggtaactcggagtgtatcacgtggatggttcttcggattcagtggctttcaccgtaatcagactgctggctgctggatggggccaaggtcgcgcgttccccggctctgctccctgtgccccttctgcctcccgggaggcacagcacggaggataagatcagatcagatccaccggtaaacctcgatacaaggaaatcatccgataatatgccgaaagctacacttagcaaccacaacaacgtaataataatcgtagcacactagcgcacaagcgaatccaaaatgatttcccccgtgcgtctcaccgataatcacgaaaccccgtcgttactcgtaatcgacctgttcaactcttgtacatcacgcaaacctccccagcgaccaccagacacccaacgaccatacacaccacgacaatgacggcgttactctttgcgaattcccaacgtcctacgtggatacccttttgtgcgaggatggatttccacaacaagcccgccagtgaggccgagaagctgtttttttttttggcgcgtgtgtatgagtgtatcggggcggcatcagctcgcgaaaacctcgtgcagaccggcaacgaacccgagctagagaccaaactcacgtgtaactgaaagcgccgtaattgctccccaaggccagcgtatacaatgacccatagaggatccgctcggataccacggcgttgctgttctgggaccattgttgcaggacccggctgagcaagatggtcgccccgatgttcgtcccaaaggcctgtttgtcgtcgatcatcatcgtgatcgtcatagtatattgatcgcgcaggccacgcggtgaataacttgtgtcaggaccggcccttctttccctctctctcctcgttggatctcgatgcgagatcccagaccctgacactcacattgcaccccaaaacgctgaggacggccatcagaaagatcgccccggccaatccggctacactgacccagctcgtccaccatccgccaaacaccctgatccagccgacgtaggagagcgcttcgacgaggatgaacatggagaacgcgaacggtaagagcgggagggggagtcgaagagagacgtgcgtaaatgttgggaaacgaagcgacgtccacgagtggagcgtcgattggacggtccgtcgataggtcgtcgccgaaccggtagccccggcgttcatgtgcgtcgtcgagttgagcgagaacgaggtgttgttcctggtgacgggcgagctcacggtcacccccgttgggttgggcccagagtttctcctgcgcatcatcgtctgcctggaaccctcgccatcggtgtctccaggaacttgcatcgagccttcgccgaccgcatctttgcgggagatcgaccgagagtcgccctggccgtcgatttttaggctgtccattcgaccagcttccactgcgcctttgaagccggcaaggtcgtccatcccttgtaattccaattcgtccgtctcaccgcccttgaccccctggctggaactcgcaggtcgcctcttggcatcgtaccacacgtcccggaggagcatgacgatggccgccggagcggtgaccgtccataccccctggaccccatgcaacaacccacccgcgctcagaccgacgaggagcgccaaggtgaaccctaacaggacggatccgaagatcgcccccgtcttgtcgatcaacgccgtcttggggtccacgtccggcgtctcgagtcggcgtgggatcaggtcttcatccctgaacacaccccagacgaggatggggaagaggacgaaccccgtggccagtacggggaggacggtccatgcagagtagaccagaaacgaaatgtcgtatgcccccgtcaagaccaggttggtcgggttggaagagacgaggacggccgaggcgatgttgcatgaagcgaattgcataaagatccacgcgcgtggaggcgagatgccggcgattcgggaaaagtaggcgaggaaagaggtcccggagaggatgatcgggtcctggtcgacggagcgtacgaaattgtcaatgaacgcccaacgtccggctatccccatgccggagaggagagactcacgttgccgacgatgaccccgaaaaagaaaaagaagaggaagaagaacaggtagagtctcctccccgaagttccacccttgagcgcgacccagaatgccatgtaccgcagtaaacccgtgcaatccagggacaacgagatgtatgcctacagattccacccaacgcttttagcatgggcctcgtaacacctccatcttcacagacttaccagcgagatgaacagcgtcatgatatcatacggcttgacacccccactcccgacgatcccagtgcggacgacatccccggggatgctcgtactagccaacaagaggaacacgccgatgacgggcgccgtactcaggttgatagggaaatgatacctcttttcgaggaggtcgtcagagtcgcgttccggtccagagggaggctgagcgttggatgtggatgtggatgtggatgaacccgcccggtttagctcggtggtcggtgcaggaggaatcgggatgggcgaggtcttgaaatcagagtcatcgccatgcgatggtggagaattgaggatcctcgcgctcctcgcgctcttgacgaggaaccgagtgagaggtcttgggagcgggattcgaataggaaacacgaccaggatatctgaggaagagcaggcgggcggggacacgtttgaacgatatcgtctacaggttcatccaagttctagcgtactcactcaccgcgataaagacgatcaaggtgaagatcgagaacccgttgatccggtgattagattgagtctccatgataactcgatgacagtgacgtggtactgagctcgctgtgacacctaattgtcacctgatgtcgagctcaatatcgaccagtagacgaatgggggtcgtcgtaaacttgacctcgtctttatatcctttcggtggtgccgagtagagacgattatctctcctttgttcgtgctggatcagcgtgctcggaccatgatcacccgtcgtactttgcgtcacttcccttgctattgcatgctctatgctgttgcacgagggtgtatgacccgaaataggaaccttgctattcaaaaaaggtagtttcgacctcttttctgcccccgttcaagtggctgtgagtgatatcatcattccaattttacttccggatttcattgaaattagcttccgaacatactaagagcccccgtcgaccagattacaaccagcgatttcaacgggtagacatgtagacatcaactgatcagatcaggtccgacgacgacctctgttcagacttcgtccgagggcgcttctgaaacaccacgctgtgctacgatgagctttcgccaggacaaagacccgggatcggtcaaatcactactagctcttcttcgttcaaaccaggatcgcgcagactcggcagggaattcacccactccatcgccagcgacctcaacggccatacctgacccttactccctggcttcaaatcctttccaccaggcgacgtatggatattcaggctcatcgaacgctccgaatggatatcaggccgggtatcagagcggttcggctccccctgcatcgtccttgcaggacctcttggcgacattgagacagacaaacagtctggctccgatcctgaacctggacccatccacgagcggatcgaggaacgggacgtcttctcaaagccgacgaggcgccgctgatgaccaacacaatcaggctcacagttgggcggaagagaccggctcttccagctcgaaacgacggcgggtcgaaagagaggtggacccttatgcagagaacgtccagccgtacgaaccggacgaagaggacggaccgccagataatgggatacaagagcaagttgacacctcgcgagacgcggagcctgtggtagatctcgtagccgaagaagaggatgaacaagatgatgggatgaaccggtatggctatacgcctgaacagatggcagacctgtccatcgaacaaggtcggccgatctatactgaactgttggagcgaagcgatgtcagggatgaactcgtaaaggtacgcagcatcaaattgccctcgtgcgggaacatgccgttaaacaggccagctattgtgtatcagttgaaaaaggagcaggaagagctcgaacgacacatgtggaaaaagagggaagagatcgttgcggattacaagaagaaattgcctacagagtgagtcgacgtgtgggccaacgacaccttgctatttcgcgctcacctgaaatcccggttgtcggtacgcctagacgaccggccgatcatccagattacaaaaaagtcgtaagtcgtcctagaccccctgtcacatgtcatatcacgatgcatattgacccacttgcgtccacagctaaaacagcgcacgaccgcactgaacaaattttacgcccagagggtattacccttttatgacattacgatcaagaaacaactcgtccggcttacggaaattgggtttccttgcctcggggatccggaactattggataacgaggtagatgacgaagtgaggcggaggagaaaggccgtcctggatgctatcgggaaggcgatcggggctaaaaagtagcagagttgaagcctctcaccacttgaaacaggggtcacgtctaacccagagggaaggcggatcggggtctgatgtcgtcgacatcatcatcagtgaggtacccttcaggactttgcctactttgcctacttcacgggatgatggagacacacccagcattagtaatcgctttgtcggcagccctcaaatggtctaacgttcatcaagcggctcaaatacgcgggctgcgtcattcattccagcccggacccgtcaacttttcagaaacaatcattgaaatacagtatctgaggccgagccagtttgctggatacatctataggaacgatgcaagtctcgaaatacccgtccgtcacctgaaaggatgggcaacgtagggtggacgatacctgagctgattcgactggcgtaccacaatgaggcggtccgcgggatcatacttcaatctgcacattgtcaatatgttctaggatgtacggctactggacatgtttggaatgtacacaactctctttcaacgacgtcgccttctggcggcgacttatctctctccctctgtctctctctccctctgtctctctctcgccttttcccctgggctcaggatacacgctccgatcacgaacaagggcttgatcgcacccggttgacatgcctcggagaagatctctccaagtcgagtatcaagaataacaaacttgccaccttgctcttaccttggcatcgcacttgggtcgtcctggcgattaaatctcttttcttttcactttctgacccatccatgttgggatcgagtcgatgacgaatttctcggccgccggttgtgttgacctcgaagagccgggtcagtcaggcgatatatattaataggcgatcgacctttttgacgacatttgacctcgtccatgctcaccacctttccgcaacagatactttggtcatcgtaaaacatgtctgccaaaacagctgccagctcggtcaggctctcagagtcgctcaaggctctcatcgcggcacctcacgctcacggatcggccatacccgctcctcctcgaccggcctttcacaacctcttcaacaagatcagctccactgccgagaagaacggcactcggaatgacgtctggttgacattatctaccggggcactggtcaccgtcaactcgccggcttcgttatgcgagctatacgactatgcgagcgagaagcagggaaaggacctcaaagagcagataaggatcgcatcggtgagcgtggagccaacccgtgctgctgggtgaatactagctgaagcgaacgtcgtctcatccggacacacagatcatgcgggaagtggggctcaagtgcatcggttagtggccgaggcctgtgactgaggttttgaatactattgactaagtcactccggacctctataggcttcgtaagctcgattcgatggtcaccagacccagatactgaccctgtcattcgcaatatgtgaaattgaatgatagtccggggtgcgtaaacaaatgttgtgatttgtcttctttgaaaaaaatgctcatcctccatcgtttgcctaaactgtcagattccgagggtatgtggatgagcttcgacaagtgtgggaaagcgagaacgtctagtgacaggacgaaccctcttcacagaccataaacgctcttggagctctgcgtgcgcacctttccgaagacgtcaaggcgggactgagcacagaatcattgaggcatgtacctgcatcgaccctaccgatgacgtgaaactggctaatacggtaaacactcggacgacagacaacccaccgaacataatgtcaatgcgacccagatcaaggctaggtcgttatgggacgggatctacgaaccgcacgcagccaagcttctcgacaagctcgctcagtcccatccggatctgcccgtccatatcctttcgtcccattatggacccctcttctcggaccccgtcgacaagttcccggaaggtcattacaagatcggccgagtgttgaccagcgtcgtcgctatcgcatgtctacgtgctcaacaaggtgtcggacctcagctgacctcgcacgtctttggtctcaagaaggctctgttggaaggtggtggggcagagggagaagccaaggtggatggacaggaatggttgacgagcgatgaaggcgtacgttgggctttggagagcgtcgatgggatcgctgaggtggtcgtcgggcgggggaggagcagctttgccggtgctccaggggagctcaaggcgaaactctagatgcgtgtctcgaagaagatggatgatatgtaaggtttaacctcccgaggttacctacgccggcaaatcatgacgacgctatatcaccgtaatctacatgcacttctgctcacatatggctccacgagatctaatttgtcgttcctatcaaacgtcggtcatatgtctgcccaatctcatcggcagctgtggccactgcctaggcgcgggaccgtttccgcgcggcaagaggtctcgagcttcgtctttacgtttcgaccatcctcatctagctatcatgcatctcatcttgcttcagaggctacatttgttggcaattcaataccagtaactttatctacatagagtctgctaactcttagatttcgtaggagaagggaaaaaaaggactgcgtcgcaatatggtagtgagtcagtccagctcggtccggaaacatgcatgccgctgaatccttgactctgccatagaaattgacattgatgatcaagatggaggtggagaacgtcaccgaggtggttcctctggatgattacgagtttcagatgaacgtgagcagatgcagggcttgatggcggatcggaagctgtgaatgctcaaaagttgctcctccgtcagatcatgtgcacgtcgtgtcgcgagcagcatgaaaatgcggtctcactcagcagcaaggtgtgttcatttgtcgcaacctttaccgattgcggatggcagctcacgttcgaggtgttttcgttcccgtttcattaggaggaacgggagatgtcaggatcgaggggaactgcgaactttgtctggcggtgtacgcaatgcaaggtgagcgagggtcaaggcatatgggcaaggctgtacaaccttgctcacgacacacgaccacacgtatgcgaacatcagaaagagcactctgccaactttatcgcacctagttcggcgtcaaaagacctcgtcgcggcatacacctcggatactgctcaattccagcccctgatcgccctcgattgccgcggtctcgaacccgtcaactttctgttcaccaacggtgcaggcgggtcatggaaggcgaaagccaacgaagagagcgaggatggttcgagggtgaagaaggcagactttgaattcgagattgacgaggacggtcggtgggacgattacgacgagtccaactcgcgaacgatcgggatcagcgaagtcgaggccaagtggcagcgatcttagggttggctgcacgaagaggctctatttgtattgatacatgaaggatgcagattactgcgtctatatcatcgtgccgccatactctcgtttcaagcgaaactgccaataatatctttctgtcgatggggagagggcagtcgggttcagtgcgtgtgggtggagagcggtaagtagtacgcagtcgcaaactcaccatgagaggctgcacctgcttcctcgtcgaccccgtgtttccttgcctccatacgtcgccccaccggttgaccttggtcttgccagcgaccccgtccccacggaccaagctcaaatctttgagttcctttcgcaaggtctcgcccgcctttttgcccggccacgatttgagctcgagcgtgtcttccgccgcgatcatgcccttttgcagagtctggaacaggcgctccgcctcagcagacgagagaaccgaatcgtccgaggtcctgacgatgagcaagatctctcgccttcccttgcccttttctcggtccgccgtcgaatcttccctgaaagtggtcaatacgcccgagacgtcgagaccccgctctagcatccaatcgtcgacggcttccagcaaaccttcccaaccctgatcctggcctcgctcgcgggacaaccacttgcccagacccagaggtacggtactgaggccgaccttgacgtgcttgtcatcgagcgaggtggctaggctgtactccttgtagtcccgcatgaggagctcacgggacgacaaccccgtcacgtcgaatttggccgcaaacagctcgtctgtgaggctctttagcgcaggagggatgtggccttgtttcaatgacgaggccgagacgtccttggtcgagcccgagatccctgtcgagtcggggaagagctcggacaagtcctcaccggcgatcttccagagaaactccccggcctgtcggtcggtctcggtcgtcttgctcccttcgcccggtttgagcccaccggtatcgatcagcgctgcggtgaacagcaggctagccaactctttaggcacgctaccctcctccgagtcgtcctttttcaacgccgcttcccatagaggtgcgaaatgcatggctaccagcgaagaggtagaccccgtaggtacctggatgatcctcggggaagctccgcggtgcatatcatcgtcggcgtgatgatcgatgatggcttccaccgggtccgccttccctacgacgtccggatgggggtgaaactgcgccaacagcgaattgtggtcgacgagcgcaaacttgaagtccatgaccgcgagttcggccgtagggagggggagctggtcgatgtacatcaagcaggattccggtacacgggcgagcgagagggcgagttggttctccggacgtaagttgacgagggtagaaggcgtcaggatcaatgggatggagcgtttgttgttgagtttagagttgagcgttgcataggcgatagaggaggccagcgagtccgtgtctgcaaggcgccacaaaggggttcagaaatttcagtgttgaagggcgaagtatgagtagccctccacgactcacctccagcttcgttacccatggcaattgtccagttaccactcctcccccgcctgagatcctccaaaaaggtctccttttgctctttcagaaactcggccaacctgcccggttcgaaccctgcctcggtagcgtccgcgaaaggagtcttgacgcccatgatgcttgccgaggtcgtcgtcgtggtcgagtttaggcaagaaaaggctcggtgactggcgtgactgatcttggtgagatctagtggtacgcaaactcgcatagaccgttcgtccggggtgacgaggttggtgtaggcgctgaatccgaggaggaggaagatgagggttccaaagacggcgaggtgacgcaagatccggggtgagctgccgatacgtcgggagacgagagatgtgtagaggttggtgtcgggtcgttcagacgtggacatgcaggtgttctttcaagccggcttgtgacttgtaagttagtgggcagcagagtcggtcgacgttgatgctccagggtatcgtgtctaccttcctttgtactgaatgtctctttagtcgcgcaacgaatatgaggaaattccgagacaagcgtaaacctagggcggacctcgagctcgaagagctcgcgaatattcattattatatcgatgtcattcgtttcgatcggatcacagaattggcatgaccctaaccgagtaggacagcattttaccggagcccggcttgacattgagcgcctgaaactgacaaaagaaggcgacatcgcctatgtcaagcgctggagaagcagaggcggcgcctcttgagtttgccatatacttgtaacaacacaccttcgagtcgaagcacagctgtcatccagcaacctctcgacaatgtcaatgatttcgtcatcataccccggctcatcgcccgatctacatcgaataactagccaccggtaatcggtatacgggcaaattccaatacgaccgcttgaccccgttccagatctcgacggcggtagcgtcatctaccaagacgtccctccattcggtctagttcgggggtcataccgcgatcacacgcaggcatgtctcggggtcagcgacgagtgactttcggcgacgaagagcagggggcgcgaccgttgactgacctgtagaccgacgtcgtccatgtgcatttcggccagattacacgccacgtcgtaaatgagaggatctacccagggatcaccgatcaagccgtccgtcagtgatgcactgtaccagttgcaaagactcgaggggaaagacgaaacctcccggtccgttcgctaagggaaggagcaatctcgactcactcgtcgctcctaatccgttccagaacgagaatacgctctcgggaccttccagcaggtcggtcacgatttcgaaaaacgccttgagctctacgtaacgcgaatcacgtcgaacggcggttcgcatagaagtggagtgatgacgcagagaattgagcctcgcgttatgaccagacgtccatccatggccacacccgactgaccctcataatcctcggcaaacgtatcgataaagacgaaatcataccccgcgccccccgcgctcttgccgatcaattcggccagctgatcacccttgcaccagtcttgccatcgaccgggcaggatctcgacgcctgtcttttcgtggaacggggtcgagcggatgtgggagaggacggaagggtgggcttcgatgatggtatgacgcgttggatgcagttcatcctgcaacaaggtgtcgatctgcgagtcgggcgcgggacgttcagctcgagactgccgaatgataccagcgggtccgttcgctagacttacgatacctagcccgaacccgatattcaacacgctgatctcttcccccctgtccatcttgtcctttaatctatctttcaccgcctgaacgtgggcgaccatcaaaggttcctcccaccccatcatgaccccgttaccatcctcgtccaacacccgttccttgccatcttcccccgtgctccacgtgagttttgaccggagaaaggcgtggttatcacccgcactggtaggatcgacgtttttcagatgaaaagtgttggtcgcggcatcgtgttcgacgtcgatgtgttccccggcagtcgatggcgtcgggtcgacgttgtgggtggaaggtccggcagcgtcagcatcggcatcgacctcgacctcgtcggttttggcggattgcatggcatgatggatcatctctaagaaacactcggaggtggtcagcgcgacatgcacaacggcgatagtttgggaggctgggactgaccttgacggataccctcgttacggatgagcatgtacgatttctcgtcgttttgagacaaggcgatatctcctgccgtcctgccgagatagtcggctggggacgaagcaattagatacggatgaacgtttgatactgggcgtccacttcgacggcgggtcgacccgactcaccagaattccatacggccccgttctccaagcagatcttgacgaccttccaatcccccctatccgcagcaaagtgcaggcaactccatcccatcgtatcctcctggtaccaacccggagctccgagatcgaacagcttcttgacctgttcaggggtaccccgggtgcatagctcgatgagacgagcagagagggcgaggagcgtctcttcgtcggtgggctgtacgggggcgggcgaggccgagttttttttggcgcctgttcgtttcgaagaacgtgtagcgggcgacattgttgtgatatgatgctcaaatcgatggtatgtaggtgaggtagttgtgggttgtcgaccgtcgttggtagattgtgaaccgaatataatcaggtcaacaggtcgatgaaagaggtcgacagagtgatcgatttcctatttccacccagagctgcgatccttatttccaccaatcacgtgtatcaataacgtaatttcctataatttccaccttgaacctggtttcgtcggatgagaccgatcgaccgggaacacgtccaaaaagggtaaaacgtcttggaacacctcttatccccaaagtcgtcctggatcaccttttgtacagtctcgagtcaggtctagagtgccccgctatatcctgatctgtaccccttgccaattttcgtcgaccatggcctacggtgcgatcgccgctccgacccaaacggtggaattacccaccctgagctataccctcccggatcaacgtcgtctgacctgtttccccgttacccgctcgaccgtgccagacggggtaggcgagtatctcttgggaatgtacaataccgagctagccagtaagtctaggatgcgtctctcgatggaaagatcgaaactcacgagcactcgctacgtacgcgcacagccgggaagacttacccgcaagaaggtcccgtcgacctggagaccttcctttcctactttttcgccgcgacgtgtatactagggatcgtctcccccggaaaagaagatccagtcgaggatgccactccggcgtccatctcggtgcaagacgccgtacaggggaggaaatgggaggattgtctggtcgggtgttattacatgtgagcgtgatcggcataggcatgttcgttcgtctcgctttgatccagtcctgataccaagatgtgttgctttgcagtaaaccgaattatccaggtcggtcatcccatgtaagttggacgaagctcgtccgcctctacgattcaaaggctgatgacatcaacatcttctcgtagaactgcgtgagtaccgccatgatcacgccaacaacatcatcatcatcattaccgcccgccacccagcccaaatcgactgaaagctgacccgcacggaccgtcacagaacgcaggatttttgatcgcccacaatacacgaggactcaaggtcggtttcacgttgggcaaatcttacctcatttacgctccgaaattgggctaccggggatccgtattcaatctggtctatacgagtgagtcctggccaccggcttcttctccccgggggggattgagcgttgactggggggacggacctgaagtcatcaggagggtagatactcctctgatacaggatactgtgcggaaaggaagaagaagaaaagtcgcttgagcgttggcataatctgtagcgggaggcccgagggcgacttgatatacctgttgacagagtactcgaagaactcggtcacgatctaatcccgcccacgaaccgaagaggagaagaagaagagaagaaaacgaataagctcggtcactctgagcaatgatcatgccgggagtgacatgtttgtacggcgtaccttggtagaacccttgaggctgatggcctggttcgtcctggttgcttgtttcatagccatcttgcaaggtagagatcgtgtcagcgtccggagtcaaactattttgttgtgatgattgagctcgagtttttggtataagttatctctgggatgttccgtctgagtttggattgtgtagacctattcgatggacgataggcgatcttgcaaaccaacaagtcgggcatatcctctgcctgaacctagctttgacggcggggacaagctcgctcgcacgaaaaagtaaacaaacaaacaaacaaacaaatcgaacatcgctacatcaccaagcacagttcggcttgggttgtttttcttgctaccaagcgaatgcacatcgcaaagcccatctttcctaccagaatatgacattgcaaccgcgtttcctgtcctttcgcttgagtttgcattggtgggtgaggcagaggtggtattctgatctctcggtgaatgggtcacccaaggttgactgccggtccctctttggtttgtagagtggaccctggatcaggcattctttgactttacagacgccccagttatcccagtctttgagctcggatcctgactgtgacgatattcgattgcctagacttgtggtttgcgtttgaatcaagacgcctgcaacatcgaaaatgatcgatccccataaaaagacggagcaaggcgtttatccgactgtccattctttttatatcccttctctccattgggattgccaatcaaaactttcccaccatgcatctactacaacgactccctctctcccctctccccatatccttttctaggacgacgaccatccatctagtggtggtgtccagcgtttgggtctccctggaagtccatcctggttcgcacgaggggcagacgatcatcagtttccaaaacaacgcgatgcgggatacaagcggatgaggggacatacttgtagacgcatccacattcggggcacctgtgcttttccagctggttgtccaagctgttggacgccacgacaaggccgacgagggagggaccggttaaccaaaaccgagcttttcgatccgagatcccaatcactcacctcaaccagatggtgtcgtgagagtcggtggggaaaccggtgcaaccgatcttcctctcggggaactattcagatagcggcagaccgggtggtcagcgagtattcgtcgttgagcttgaagcacaggctctgatcttccgtgcgagggcgggtcgcatcggggtcgagggaattgtactacgagtgagcacgaccgagtcgaggcctagagttcggcgggaaggctagtcgtacacctgatttcgcggtaaataccccccaccccgattcgggggcctttctcttgccgatccgatatgctcgcgacgctgacccgaacccgcccctgaatacgcgcacgctcgactcaagccgactcaccagactgtaaaccgagatgggctccttcatcgttcccaacctctcgaccttcaagggcttcatgtcgaaaacgtccactccgtcgagcttggcgaggagctcgaatcgctcgagaccggtggattggttctcgctattgggtcgatgtggcgggtgtgagtgatagggcgaaggatcagtggagaggtaagacagggtcgaaggaagcatgatcagtaccgtgtcttaaccaccgcaaagtgaccgccgaatgtcgggcttactcggtgggcacttgaccggcgggggatccctatgatcatgaccatgaatggattcgtgataacaagcacggatcaaggtcgaggtcgatttgcagagtccggcgttgtaagagaataattcgtgtcgacgatagatgaacgtcgaggaatagatgacgatgccacggaagcacgggagagagggagaccgaaagagaagaagacgatcatcagtaatcagacgtccatcttatcggtcgagtctttccatcatgctatcgctcgctcgccatctcatatcttctgcgtgacgtatggcgtcatcccctctctgaagagatgcccgacagtccatcactcgctcgtcgttctttcctgtccaccgacatcctcgttcaattcaaccaccttctttccacgcgtgatacgtcttcacatcgaggacgaagcgtggtcgtggtgtaggtccaagtcggacgacaagaatgtcgtcgccagggccaacccgattgatccggggttgcgggaactcggtcacgctcgttatccaagctgtggcctatacggatgtatgatcctctcccgtccgtccgacaacagaggtcccgcgtgggtcctcgtcaggtcgatcaggcggagattcacatcccggccgctggaggcaactttgaggagagtgaacgagctcggttggagctgacccgactcatagctgggcaggttaatgtcatcttcgacgacctcgtcttgatttccccctgacacctgtctctccaactttcaaagctccgagatcccccgtcctcttcccgactcattcgctcgctcgctcattcgctcgctcgcttcgtcggctctctcgactcacctctccctgcatcactgggggtccatgtccggcgctcttgatggccgagacgttgaaagcccggagagcgagcttgttgccggtagtggtggtcttgatggccgaggcggcgggcctgacgagttgacgaaaggacgaagcgaacataacgcggggatttggtctacactacgagcagagatgagagtgtgcaaagaggaggcagggggtgttttgaggtgagatatggatatggtactttggctcgagttgtgtagattctggttcgtcgaatcccacggagagaaccgggggggaggggaagagaggcagaggcagagaggaatcggagtctttctcacgcgtctccaggtttcaggctcagtcaccttaaagcgtaacgattatctgccgtcattgttaacggcatatgactggtaggcaatgccgtcatcgtgagctgatacttctagtctgccagtcactagagcgagcattctggaatcgtcatctcatcaaatacaacagggatatcgggatgcaggacgagatgctatactcactactactaccaatctactcttcgactttgcaccaactcggcagagttctaccacaatcaaattccagctgaatcctgacagcttacttatcctatcaacacgtgatccagtcaaaatgcctctcaattacaacaaatgggacaagctcgaggtaggtagacgcaacccacaagctcatgatctggccgacccccagctgatcatctcgtgctctgacctagttatcggacgattccgacatcgaagaacaccccaatatcgataaacgaagcatgatcaagtgagtttccccccttctcggaacagcgctccctcgaaaaatagacctgagacggcaaacgctgatccacacccttgaacgatatctcctcgtttcagctggaaacgccgagatattctcgaaaagcgagaagctcgtcgatcgaggatcgctcattatcaagcggaaatctcgttgaacgacgtcctctacccccgactcgtctccctcaggaactcgattgcgtcggcttcaacttcgacctcgacgtctagctcgtcgacgacctcggcctcgaccccgcgagccatcttcagccagaccgtcgagaaactcaaaacctcgccctcccccgataaaccccctactggacacgaaaagcaaccgacgtacgatgacatgatcctggacctcttgatccggatctacgcctcggcgaaagagaccctgagcccccgtaacgacccggacgaagaagcatggagagacgtcctcgtcagcgagattgaaaagcacgagggagagttgaaggaacggaacgatgagttgagggggttgatcgaaaaggaggaaaaggagcaggggagcaagatcaccagcgaggacatcaaagaagggttttcctcaggggtgagtcggagcgtgggatatccgcacagggctgtcagggtattgatgcttgggaatacgggtcaaagcacatcaacaaggcgttgccttcgccttgggagcaagaagagtcggggaagaaaaagtcgaccagcagcagcaataacaaaaaggcttccacctcgaaaccctcgacttctatcgaagttctcaaccccgccgcctctacctcagggcctacacccgacccggacgatcaggaatccgaacagatccaggttcccgatatcgaagataccgacgaacctcccgccatgacgtcgagcacgaccgcgttctcacgcctgcccctccggggatacacccagtcgttcgaattcattcaaaaagatcccagcatcttgatggagaagaacacggacgccctgttggcggaagctttcgaggccgaattgaagggggagggcgagagggcgaaacgatgtgtgcatcaggggttgatgatccaatattgtaggaaattgggtaaagatggcgtcaggttgttcttccaacggtgagtcctcgtttttatttccttcgaaaatgtcagaccgccgcatagaccgatactgatcatactctcgaacgaaaccgcgcgtagtatgcaacaaggcggacccaaggcggaatccgtctttcaaacagacgtcaacgatacctacacccgaatgtccacccgatgcgctcaaatcaagcaggaacaagccgccgccggtccgaacggggaacgagagacgatccaactcgtcgctgaagatcctagcaccaatatcgggttcaatatcccggacgggcccgcacccgataatctcgtcatcgagggcctggaagaggatcaagaggtggacatggacgagatcaaggcgtttttgaaccaaaagtgggagtacttccaggggttccccgagccgctcaaaaaggcgatgaaatcggaaagcttggacgaggtgaacaaggtcttggagagaatggagttggaagaggccgaggagatcgtgcgaaagatgcaagaaggtgggatgctgagttttaggtgagtcgagacgtcggtcgccggccctacgtctggttcgagctgggaatgcagagtgctaatctcgaattccactctcacgtcccatagtgagagcggggtgagggatatgaccggcaaagagtagaggcgtgggcaggattgataatgacgagtgttccctggggtcccaagggctgactggaacgatgtgatggataacgaatcatgtgacgtgatgagcattgttttctccgacctgctcggtgctcaaggtgattcatgaattcgcggccagtcttgagtaataaagtgcacacgacgacccgcgacgactggttgcggcctaagggcctgctagacaccggatgggaacatccctcgttcacatgggtattcacacgactccagtggcttgccacacagtccatcatttcatcattgtacaaattccggcatcaattcacgtcgatagcgaatccaccgcatgggatcgttcaagcagctgcggtggattttgcggccacagcggggttcttgtcgcagctcgcgcacttgcactcggtacaggcgcattgtccaggggtttcacagttcttgcaacgcttcttgcacctagagatagtgaaaggtgtaggaaggaatagggcaggataaacggagacggacgcaaatgaccgcaagtgatcagccgttgtgcgtgatgtaaagtggtatgacaatatatcgtcgaacgtgaactcacttgcacttcttctccacgccttcctcatcggaagaggacgaagaggatgagtcgtctttgctgatagcgcggatcgtatcggttaacagtttgtggagaccccgcaatgccagtgcctgacctacccaaatgccatgtttacagtagtcttgtgtagtagtattcggtatagatgatcgacggattgtataatattagaggactgtaacggtctcgctgaccctaaatggggatcgatggcagcaatcctggtcatatatacctactcacccagctgaacctcgagcgcaccgggcgagtcgatgaacgtcatgatgacgctgccaagagcaatcgcttccgtcacctgacccgtcacgtctgagaaggagggcggcaacttcgctgagaaccgtgagagttcagcgggaggtcacgagggagtgctttggcagaaagacccttcgacatcacaaggcacctaacatgtacagaagtccagcctagacaaagaacggcctgatacttctactcggtacaagtctccttgctgagggcgcgcccgcttggttctgcaacgtcatgctcgtccgcgactggagctgcactggaattatatacccgtggtcgtgaacaagtgccggtaccttcccaactcaaggaggaactgtgctcagaggggtacacaggcaatccgttcaggagcatcactgattactgccgcctcgatgtatcacactgtatattccttcatcggcgcggttcctgacttatttgcaagaagcttgcctgggattgttctatctcctttgacagcgccgggatcagttcttcgacggaattgaagtggctgaatggctctcgagactgcggggtaggtcagccttctcctgactgtggttgccagggctgatagaaggttagatccaccacgatcctgcgattactgcaaagcctgcaatgctcgttcgagctgctaaagtcgaatgatttcaaagcattcctgtcgacattcgctgccgccatctcaagacccccctccaccaggccccgtgtcagtgtaccgagggatcgattctatcaaagcccgaagggtgctgctgatgcggttcgttctagcgacttttaaagccgaatatctatatagaatgctatcatcggtacaacttgtcgcagctcgttcaatgttgaaagttcctgctcatgcgactccgccgcgattcctcttcatcctcccaattggaccccttgaggaattcgaccaggtccaagcgcgtctcgccctcctccatcatccgctcactaccacatttagtccgggaagagtttgacccatgctgaacgtaccccccagcttgtttcgaggggtcagagctggacggatcggttgagcttacaccgtaagagacgacgggaaggctcatcccaggaccttcaacagccttgtcccaagcggcagagtcggccgggtcgaaccgagtcagaccgctcggtccgggtttctcttctactcttctcccaccgttgggcgtatcattggtgccggacgacttgcgagagttgattgtgaacagtagtgacaaagcgtaaagttcggtgatcatccccaagaggacccagaacatggcagactctgtccgtcgatgaggaggtccgacgagaaagaggacgcacatgacggcagcgcaggcgtgcgtcaggaggacggtctccagcgtgagcgagatcagtcgctgtatgatcctagtggaacccgactttttggtctgggcccgtgctctccagaagcatgtcaagagtgaggcggtgacgatcccgtccgatatcgcggagagccccatccatagtatcgcgaccacctgagacggaactccgatgacccggcccttaaactcttcgagcgagacgaacggccggtgtgcccagatgtatgccgtgacggccaagctgtggttatgacgcaagatcgcacgatgtttgagcggtctagcaggatgacggcgaggtcgacactcacgcgattcctgcgaaaagggtgattatcgggagaactatcatcaagatgccgaaccaccttcttcgccctagcaagacccatgcgcgccgaccaaaataaagttgagcggtgaaccccatcaggggaatctgtgagcatattctggctgttagctcgtaatgttgcgtgaccatgaagtaccatgcgaagtgctacttacgaggccatcctgaaagctaaggggccaccagaatattccccagacttgtggattccatatcccgtccacatagtatttccaggacccaactatcaagatcaggacctgtagtgttcccagcagaaagatccatcctacgaccaatctgtacttgagcgagtctccgccgtatttcgaaaagtagcggtaaacttgggaagcatgaacgccataaaggatcgactgatccagaaagaccgcagctcagccattcagattcgccatattggtagagactagcatatttcgtactcactccaagaaaggaaccgatgaggaaacccagcggattgacaggataagggttactgctgatcttggtgggatctttggacatcctgccacaaagaacctgtgatgctcgtgtgtccacggaagatctcccacgctaccgcctgccagtcatgcagacggcctggatatcttcctttgatgtgtaggcgggtttttaatgatcgttgtgaatgattacatgcactaatggggagcgatgtgttttcccaccgcttcgatattaccggatttcctcaccgcatgcatcgttccaattctccgatcaaatctcacgataaaggtccgacccgaacatccgacttcccggctcgtgagcgattcggaagcttttcagtcggcgaaagttcgagccaggcacaggcactctcttgctaaacgagcaatgtctcagtcgaatcgccagtagagtaccgcagtgcatcaggaaaactgtcaattctatgagccatgcaagccatcaaggtgttgacaaaaattggtccccctaatgatctgacaacttgtcatcgatatcttcgattcatcacacagcctttcgcattataaggcgatcccacggggttcgtcgaagtacactgcgcgatcatcagtgcttagccagactccctggacgtatttcttttcgatgtggttcttcaaggcggcgagcggactgatcggaagacaggacgaccgggtaagacgaccgatgttaattgtaagcagaatactactcgacactcacaggtcctgaagatccgacacatccggtcgattcctctcccaaatcgcgttgcctcgcatgttcccgctagacctggcggtgagtatcatctcctctgtccacttgtccaggtctggacttcgtactttggaaacgtgcgatcctaggcctcgatgaattcctgcacatcgctggcagagaaacatgacgatcgagtgattatgcaacgagacggtcgcccagcgttgtgtatattcgcctcggagtgatcgtcgacaatccgcgcagctttgattgctcggttgatcggcgaccttgcgaagcatagccatatcggcgatgatgatttgcttatcggtctccatctcggagacatgtgttgtcgtccttgacagcgggattggcccaaccgaccgcggtcgtcccttgagagatatttgtcccgcagttgactctgccggtggcgagacgaacccgtcttcgttctcactgttgttagcgaccaagatggcccgtcgcatcccatcgtcaaagtccaccgagtatccagatcctttacgatgttgcgatattggcacggatggcatgctccctcccacggccgacgtctccatcgatcgaccgccctcatcgctgtgttcaaagactgacgccgccctaccgctaccctcggaagaccgactggattgtcgactccgactacctagcgcagcagggtgtgatcgatgacctggtacactcaagctcgaccgagtattccgagcggctccactagacttggagtgatccttcaacagtccgctcaaatctgatcgcgatttcgattgaccgaatccgaggcttgtccgtgattgccggagtgcttccttcagtgacggcttcttgttaacgggtttggatctgcctgccagtgcgtcatctgtatcccctatggacagactgggaaagccgagcccgacgccggtctctagctccccgacgggcgagccatactcatcgaccgactcgcgatccgtcaactgattgatgtcccgaaaagacgacgtgccgttgagtaccgattcgacggcgttcgatatggcataaatccacgacttcatttcttccatcgaggtcgcttgatacattcgcttgccctgcgtcggggttacgatctcgaacgctgtggtagcgacatcgagtcaatcgagaaccgagtcaaggcagattgcgaacaagcacttacagtaccgcctatcggtatcacggccctcccgcgcggtagcaaagcgcagatcgatgacctggctggcagtgtctagtctgctcgaaaccccccctcgatactgtataagcgaaccatatgagccggaagtctctcgcgggtcgatccatcattaaagctggacacttgcctcgtacatcttgcaacaggatagaaccatccaacaacctgacatcataccgatcgcgtcagtgcaacccctcaagagccaagcacaaccgagaaaatcgctcactctcccatttgaccttttccttgcggtccccagcgtgtctcccgctggagaccccgataccctcccatatgcctgggctccataccaagccttctttctttcgtcctgcctgcaccctcctcgtttcttcttccaacatctcggcggcagactgatcctgaagatctcggaacgtcggaaactttttcgttcccgccatcgtcggcgtaggtgcggtggaagggattgttggggtgtatgagaaggcagactctgtggctgtggtcatgatggatatggtaggagaaagcaaacctcctgacgggcgatcgccttcctgcgtgagtaccgaggccgccgagggtgatcgacgtccatcatgatgtctcgacggtaccgactgcagagacaacctgtttgacatctttggtctccgatatgtctcttctccgtcgacctcgtcgagcgcgggtgaaaccctcgaagggatctgcaacgacattctcgacggaccgatggtctgactttcgtccgctgcattgttgaacggttgttgcgactttgcccgatcccgttcgtccttgtagcctaccatgctggagagcccaccatgtatggacgaggcggacgagatcatccctctgattctactgcccatccctcgatgtttctttttcccgccttctagggcgcccggtgaagaacccgtccggtcgttgtcgctctttcccaagccaaacgactttctcctgtccttcttttgtgcgtccatccccgatgcgatagagcccgcccgactccccctcaaggcttgtgagtccctctctaccctactctccaattcagtcctgacacgttccctgtgcgcccatgagttctccagtgcttctctttggctagccaactttgccgatcgagctcgcaacctcgtccgtatcctccccgctgtggggtattgccgggccgtcggcgttctgtcttcagttttggatcgttcgcggcccagatcgacaaacccatccgaatcgacgacctcttcgttcaaggtcatccccggaccgatcatccgatgatcccgttttcgtgttgtcgagaccttgctcggtcccgggagagagaccgtcctctccctctcttgcctgtcgatgaggaacccgccattgaacctcgtctcctcctccgaacgcgatccgggtccgagtgtagacatttctgcttggacgaccccgcccatccagacgtccagacatcctttcaggtccagacattcgacactcgttggcgggcacgcccagaggaagagagagtggacgtcgaacctctcgagatcatactctttgtccagtacctgtcgcacggtgggttcttcctgatgtgcggcaggtttagaggacgaggccgggttgttcgccgggaggagtgaacgggagaggacgtgatagtacgacttggacgtctcctatgagcacatagtcgagatgttcgagcagaagtaagacgagcctcgtcagtcgtgctttcgacccaagacgaagttattacgaccgggaggatctccgcgggactcacctcgaactgtgataatgcggtcccattccccacgcctctccccttgaggtgactcttcaatcctctcaaccgtctcatcaagaccccttccaacctctccttttcctcttccctacgtcttgccaaccagaccttgacatcctcaaccgcccccagtgtatttgaaacccccggggtcgacctcgatgatgtacccttcccggccacccggtcatcatcctcggtttgctcccctaagagcgaatccaaccgcgcgagatcgtccatcaaccccatctcggccgttcgcaacgcgtctaaacagtcggataccgtctgtgcggatgagagcgtggatttacatgatttggagaggaggttcgcgcggtgctctaggtgggcgagagaagctcggaagagcggggtgtccttggggatgtcgatctccaacatggttagatgttgattttgtgggatcgagctcggctttttcgatcagtcgagcacaagggatgggggatgggctggggaacatgagcagataagagagttgtcagtcggcatagcgtaatacaagattgtgctgatcgaccgtcgctcaccagcaacctgacgagacgagtctgaatggaatacggctattatcgtcccggcgacatgacgcttggtagagctcctttcaaggccggatgtcgtcaaggcgtgatgggcaccttccggctggacaaaatttcaaaaggctcgtctcggtgctagtgttaccagtctgtctgggtgcgtacgtctttgatctttgttaccctttatacacgacagatcatcatcatgcatcatgtctgtttgaatcacgagatggtcgcgactttgaatcgtaaacatccgctcaatctcacagcctgtctcttgcccggagggggggggggggggcctggaaaatactgaccatctctcgctgggtaatcaactggctggcgttgaactgggcggtgacggatttcagaacctcgttgacgatagaggggagtactcgctcgtcgtagtcggtaccaagctctcggtagctagcaggcgcgagaaacttggggtcagcatggtaacccccagggacgacgagagatcctgttcttctctaggacgggccgactgacatggtagggaggtcctcgacggaaggtcgggacaggacacgacaggtgatgttgaccatctgcagatctaccaaccgatcggaattaccgcttaaatgagtcccctgcccccatgcgcaacgcgtctaacgtcaaaacgacgtcgatcgctagactgacccttggtcccggtcaacgaggcaatgttcctaggcttggccctgacgtcgtagatgataggactctcgaaccaagggatctgagacgtagagaccggagtgaaatgggggcgggaaggcggggatcggtaggtcagcctcgagggtggatcgatcgggagacaaggagcgtcgggaatgggctcacgttgaagtgggtaccttcagggtagatggtcgctccgataccattcaatctggaaatgacaagagagagagtaaaggatcagtgagccgatctggcgggagagacgggaagggtacagggcgatcgcttaccgggtgtacttgatcgctcggtgacctccgtcgactggaataacgatcgacccgaatcagaatcgcagcccaaacatcgagatgatcaactcccaaggagagggagtacacgccaggacctaccgttgaagatgctctggttgatagcgaacccgccgatggcgagggtgacgagcaacccgcccccggccatgaaccccttgagaccacccggtccacctccgttaggacctcccttgcctccgaatccggcaccaccgctccgttgagccttggcgaattgcacagcgagcctttgcaaggcttctcggcctacgtaaagtcgatgggttgaagggatgcaggatgcgtcagtcagaggacggatcggcaagcggggggaggatgacgaaaggcttcattcgatcggatgggtggtctactgacctgattgagggttcatgttgatggctttataatcagacgatcgatcttggtatcaggctgcgctggaatgagcttctagaggtcaggatgtcgtgttgtggttgttttagctagatagttgaccctcgatcgatgtgcccctctcctattctcttctgtggtttcccgaggtcgaaatcgctgatcgagcgtcgtttgagagttcacgaggcgagtgagggagagatcgaatcatcgaaaacgcataaacagccacggcgaggtagagggatggtgttgatgtgacgtgatttgatgacggcatatttatgcgttctcaaccgatgtagggatagacggtgattgcgaatctcaaagattgggaatgtcgacaggagtgaacatatatgtcttagaccgtataaagctcgtgacctttattgaaaggaacaacagcaaacgacatccatagataaagtcacttgggttcttcttcagagttgaaaaaggcacaccaacaaaccatcgaaccacttttcaataggacactcgaatctacacgacagccacccgactaccaccacactcgccaaccatgccctcatcaacacgaccttctcctgtgctcaagcacgcactcgacctacccatcttcaagttcttgaaagataaacgcgtcgtcctcgcttcctcctccccgagacgccaagagctgctcgacctcagcgtgagccctcacccgtcctcgaagctatcacgtctagctactctgcatgctaaccgaccccacatgtgtatatattcgggtcctacatgtttagggcctcaaaccagagatcattcctagcgaattcccggaaaacttgcctaaatcgatgtacgcgcatgcgttggctgaataccccatcgcgaccgtgagcgtccggccgtgtgcttccaccctagctggcctacctcgctatcaagctgattcggtcgctcgtcctcgatatatgataactggataggccggagaaaaggtaagacctgcgtgtttctgtgctactagatctttcaagaggttgacgttgttgacaaactcggtgatccccgatctgcaggcactggaggtgtacgagcggctcgtcaaggcggacgatagggacgcacctgacctcgtcatcggtggtaagccaggattccttgcacaccttcatcgagatcacgccacccccgcttacacctccttacatgtacggaaatgatatcgtcttcgtcgcagccgatacggtcatcatcttcccccctcaatccaaggtggacgaagggcaatccacacggacggccttggatcagcccgagccgtccaaggtgtttgagaaaccgttcgacaaggaggatcacgtgagtcatccccctcggtctgcccctctcgctcgtaatcgaggggattgggtcggtaatctgacactagatgcatgcatgcgcgggtggtcagttgaggatgttgcaggatttgaacggcaagacgtgtgagatcgttaccggggtcaccataggtacgtcactggcgtgcagacctgaaattcacgattcaacctgctgatcagatcacaaaccgcccaacagtctatccgacactaggtgcaccggggttcaagctacagtatgttcttcggctgcctctgtggaaagccttcgctagagagactgacaaggcccgacctcgtattgaacaggtccatctctgtctcgacgatcgcgcatttccgacaaaacaccgtacgtcccggagcggtgccgtagtcataccgaccgcgagatgaccgtcatcggctcgactccgatgtgttggctgctgacctcgcggtgactcgttccgcaggacgccgagttgaaggcctatgtcgagcatggtgaagggatcgaccgagcgggcgggtttgctatccaggtacgaccctttttctttaccggccatagtcaacggtaccacgaccagttcgctgaagtctgtatgtgcgtgtgtatcggacgccattgcgcttacagggtgccggtggattcctcgtcaaatcggttgaaggcgattggaataacgtggtgggctttcccgtatgggagttttggcactggttgggagagctcttggaggacgacgtgttcaacgagtgaagggcgagagtgcgcatgatggacggacatgatcgagcttgaaacgtgtataattgctgtatcgaggatgtagatcgaggtgagaccgactatcactacgagtagtactaggggtcttgtctgttgtccggtcaaatccgtcgatccgtcggagcagtgatgatcacatttcgtcatttgcttccgagattagcgcccgagagaaccgggggcacactcactactacagatgatcgtcgtcaagggaagccattcgcagtaacatagtagtgtacagcaatcgtcgattacttactacatagaaactctctcgcatcacactcctgacagtagtagtagtagtaggtatcgattggatctcgcatctacaccttcgaccaccatgtcgtcacctctcccggaacaagagcctctactgagcaaagccgatcgcggcgacgtcttctcccagaccaggaccacgaccactaggaacaggtcgacgagcaaatcgaaacatgtcgcgatcacgcccgctatccagtcttcacagtcgacccgaaccactgtcgatccggtcggcgaggatgtatggaaactccccatcgcacaacgaagcaacaacgccccgctcctctcccgcttattcgtcatacccacctttatgctcggtctcttggggatctttttcattcaactgcccgtcttcccgctttggccgttgatgaggatctttggggatcggagttgggtggggaggctgtacaactgggacgtcgagtttacgaaacagttgttcgggatgctctgtgagtcgtcgatacgctctggtctagttccggctgtgctcccagtggggtgcagtcgtatgggtggtcgttcccgggactgacacgctcgttctgtttgaacttggccccgggggtgagggtagtgatcatgatattctccctgtactccccaacatcgatcacgatcaccacaccctctgcatcgcatacctcgctccccctctcctctctcgtcgtccgggaccctcgaagtggcgaaccggtcgctctgaacctcccccagaacctgatcgtgatgagtaaccaccaagcctacctagactggatgatcatctggttcatggggtacatcagcgtcgtccccaatgagaccgaggggaaagagggcaagtggacggagagcggacacggggcgaggagtatcatcatcatcctcaagaaacagttgaaaaagattccgatcgccggttggggcatgtgagtcgcgactacatgcgtccctcttgtcgacatgcacaccgctcatcctccttgtggttttcatttaccactcgtgcgtggggacgatccaggctattttaccgattcatcttcctctcccgttcctgggcggaagaccaaaagatcctcaccgagtccctctcggacttgtccacccgggcgaggaaccggcccgagtcggggttgtggttgaccatattcccggaggggaccatcaccagcgacgaagagagggcgaagagcaagaggtttagcgatcgggaggggatggtacgtgatcgtcacgcgtgcgggaagacagtgatgatactgatgctgatgatgcgacccgaccgtccgactagcccgacctggtcaacctgttgcaacccagatcgacgggcatgttgttctgcctgaggacgctcgtcccccagatcccagacttgaggatcctcgatctgactatcgggtaccctggagtccctcgaggaggatatgctcaggaatggtgagcgcgcgatctgaagccccgatatcgtccttctgcgggtagacagctgacggaattgatttgcttcgcggtaggtacgggttgaaaagcgtcttcatgctaggtgtccctccgcctaccatccacgtacatttacgtatcatcgacccgacggacggatcgatccccggtgtccccgcagccgccctttcgagcccacgggcggccagtgttaagcccatcctgcccggtctagccagcgagagtgaagctaaagcgtttggcgagtggcttcggggccgatgggcggacaaggagatcttgatggacgggttcacagccgctcagtggcaagggtttcaggataccgacgtgggagatgaagaagaggagaggaacaaggaggctctgtatggcgagggaagcgtggcgttcccgatcaggttgacttgatccagggggacgggtctctcggagatgtatacgtgttcccgcgcataggcggtccttgacgatcctttgacgactatgaatacgattggtatagtacttggtactaagatctgctgtagtgtcggcctgggagtaagcattcatctaatggcgatcgattgacctttacaatatcgctcagcatcggcacgtgctagcgaagaaaagcaacagtcgcaatcacgatcgttttccaacacaagcaacgatctcagagagcagcggatggctccgagatacagcactgagcacttggcacgaacggtcttgagaagccgttcgttgggatgccagcctggacatcacatgaagagacatggcgccgctggaggccatcgtttccacagcaccatccgcatcaaagcgcgaatgaaagctggagcggaagatacaaggccgtccaattgatttgcaaccatacctgacgacgacctatttgtcacctactgtagtctgcttctctcgctgtatgggaagccagatatcctatggcatatggcctataacgatgaggggacatggcgattacagatcgtttcgaagcttgagaatgtgttttgcgcctgttcaacattttgcttccgttaatcggaacctgttttcgggtcaacacctcgaccaaaagtcacaattcgatagatagatagatagatatgatcaagtctttcacagctcattgtacctcacatccaaccaatcgtgccctcgttaaaatatcctccgatttagtagctattccttcaataacgaaaatggacgagattgttgtgcctcatcccgcggagtaagcacaatctttcggcatgcgagtgcttgtccttgtactcagtttattcgatccacagcttccacgttcatctccgtcaaggagccatgtccgagttggtaactccgcatgtagcccttggtggtattcgaaccgcctatatcatggtaaacacatctcgaggggaccgtaaagtgactccgctcgaggctgattcggtccggcttgttgctgcagcccaacctgatccctcccatcacgacgaccgaacgagccatggagtacaaggccgaactggaaaagatcgaccccaaggtcgagtacctgatgacactctacctgcacgagaatatgctggaagaagtcgaagtcgagggggaaaaggtgttgcgtggagtacaagagattaggaaggccagcaaggccggcgtaaaaggtatgttttcgtagaagctcggcgactagagcttcgcaagtgcgcttacttttaggctaatcggctctcacaggcatcaagtcttacccccgaggagtcactacccactcgtcgagtggtatcgagtcgtacgagccttactaccccgtcttcaaggctttggaagaggaaggcatggtcctgaacttgcacggagaggtaccgagcgatgacaagctggtaagccgacgtcccttgcatcctccctttggtcgaccattccagctgattggcttttcgccgcgacatcattgccacctgacagaacatctcggtactgaacgccgaaaagcacttcctttcacacttacgaaaactcgctggagatttccccaagctcaaaatcgtgctcgaacacgccacgaccaaggaagccgttgattgcgtgagtattcggcccacctgatctcctccccgacacgaaattgattagccattgtcgcaatttctaggtcaaatctctgccggacaatgtcggatgcaccatcaccgctcaccacctgctgctaactatcgactcggtaccgtcacaacctttccacttttgcaagccgatcgccaaggaacccgtcgatcgggcggcgctgcaggaagtcgtcacctcgggtcaccctcgattcttcctcggatccgattcggccccgcattcgatcgtcaacaaaatccccaagatgccttcaagctatctgacccaggagaccggagccatcgagggcaacgggcctcaaccttgtgccgcaggagtgtacaccagtcccatcttgctccccctcgtcgcgcacattttcgacaaacttggcgcgctcgacaaattgcccgggttcgcttctcataacggacgagcgttctatggaatgcagagggagggaagtgatagtaacgtgacgttgaagagggtcaaggatggtggcagggtgccggccttttacaagggaagcgagcgcgggatcgatgcggtcccattcatggccggcgaggccttgggttgggagattgcctgatttgtaccgaccgttgatgaaaatggtctcgtgtctttatgcaggtctccctaagtatattccctgcccgctcaggtgtgcgaacaggtctgaggatctcttcgaaatcacctcccgttccttcaagacacccttcggccgaagtgaaccgacgtcatggttggtagcgtgattcgtcatctttcccctcaaaccccggtcgattccctggaaacagataccgttgctgatggcatcgaccgtcgtatataagctcataccactgctgtctttggaaatcgaggatcgtgctcgtgtgctgcaaatacagtttctgcatataagaaaatccaacatgtcatcggacgcttcctcattgcaagacgtggaatggttgtttttcgacgtatttgggaccgtcgctgactgtgagcatcgcccgcacctgaacaaacgagatcttccccctgaccccttggactcgcagggaagagccatacctcggcaactctgtgtaggatttccgaaaaggtcgatcccgaggcccacaaggcacatcccaagccggatgacccgttctggctggatcgtgctcaggaatggaggactcggttcatgaaacacattcgaactaagctaggaaacagggagcctggggggatggatgtgggtcattgcaggatgacggtcgccgagatcaacggaaatcttaggcatttgctattaccaggaggtacacgggttcttgttggatgatctcgtcaaggaatggggcgtcgaagacaagtggacgaaggaagcgaggctagaggctgtcagggaatggcactctctgccaggtacgtcggggctcgtagtcagagttccgtgggatagagcagctaacctggcgactactccccttgccaggctgggccgattcctcggccggattgaagcggttgcacaagaaattcatcttgcaagtctcgaccgcgttacgatgcgcaagcccggactctgcttacatcaactcgaccggctttgcagatcaaccttgacgaacggtgacctcgccgtcatgatcaagatgtgccgacgagccgacttgactgtcgacacgcatatcacgttagtctgatacgtgcccgtgtaacaggcatctagctgattcgtcgaggtgatgcatgcagcggcgattctcttgggacgtacaaacctgatgccaaggtctatcaacaggggatcaggctgtcccggctggatcccagcaaggtcgccatggtagcggcgcatgcctacgacttggacgcggccaagtcgcagtgagtggtgtaccggcggaatatgggttcgaggtcaacgctgatcccgcatcgactttctcggtagcggtatgcgaacgatctatatcaaacgagctaccgaggacgcgtccgacccgatcactgaagagaatgcaaaggggcgattcgacatgtttatcgatcttggaggcgacgaaaagggaggtctggtcgcactggccgaaaagtttggcctataaatgtggccatcacgagccaatgcaagaaatgaacggaacaagcatgcaaattcatcccattttgtaagatcggtcatgaaacaaagagattcccttcgagcctggaaagcgagtacacgtcgttgtacatgctataagccatctagagaacctcttcgaccatcttgatgttgaccttttcaaactccttttcgagttcgttgcagagctgacgggcgcaaaggtggtgagctcaccattcactacgagacggacgacgagggacgggcctctctactcacgtcgatatcgtaaggggccaagacaccgggggtcttgatgacgcctcggaggacgaggtcgacggcgataccacaggggacaccgacgagcctggccatggccgagtacccgttgggcgaaccctgttcgtccaagaccgaggtgatggtctcgatcttgccgtcggcacgctcgacgacgaaggtgtgctggaggtagaccaagtcgacctcgttcgactcgtactgcatgaggttctcaagacgagcgcagagcgtgtcgagcaagttgccacgagcctcggcggcctcgtcggagaagagtccgagctttttgaacttggacaagaggatgttggtcttgggctcggcgaacgaggacaaggtgcggagcttttcgatgatggcgctacgagaaaccgttcgacccgtcagcgcgacacgtccccgagtccagtggcgacgtctctcttcgcgggcggaaacactcacgactcgctagcctcggacccgatggccttggcggtgatctcggcccaggtgatcttgctaccctccttcaaccaatccttctcgtcgtcctccaagtagcccaattcgacaaacgccttgatcatgtcatcgaacccggcgtacctcaacgtaccccgctggatggtctgcgcctcgggaatgttgtaaaactccctaaagggggtcgaatcccggttagggtaacagataaagttgtaagccgggttggagaccgggtagggtttggcctcggacatcagatccttgccctggacggtgacgaccttgccgtcccggtaaaacacgccagtgttacggagggcgaggaggacaccacgggcagaccagctgaacttgtacccgagcgggttgttggcagccggggtcgagggaagacctccacacatcgagatgaagctgaggaccttgcctcccttcttgtgaacgtcgtcgactgagtgcggacggagtgggatgggtgtcagtgtccgatcaccagcgcgcgaccatgcaagacattatggcggggggagacgacgcgccgacgcggactcactgatcctgacggcaccgacgtgatcgataccggggtccaaaccgatctcgttcatgacgacgatccctgcctctttacacttttcctccaaggccttcatggccggggaaacgtaactggtggtgacgacgtgcttcttgttcctgatggccgactcgatgacgctggcgtggtggatataagggatgagggagacgacgaggtcacactccttcaaggccgcgtcgagggattccggcgaggtggcgtccacctggacggtctttgcgccggggaactgggtgatcatcttttccgccaactcgacggtcctgcatccgacggtgagctggtagccctttttcacgatatactcgacggcgggggcggcgacgaatccgctaccgagcaagaggacgcgcttgtccttgccctcggtacccttctccatgcccggtcgaacgccggcgaaatcctcttggatcaggttgccatcctcgaccatggcccttccgaattcgggcaagacgaacgccgctcggtggacgttcgagttgtagtacttgcacccggggacgtctcggagcggggtagatacgctcctctccgggtcgagggaacaacagacgaacccgatctgacctgaggggtacgtggggatggtcgtgtacgcgtactcggcgacggggaagagacgcttcgtcgtctccctgagctccttgatgaggggcaagtgcaaccagagggattcaccctgggtggacatgtgacctccctccttgagagcctttttcaagagggtaaagtagggagcctcgaacagggccgcggccgggccgacggggtcggacgagtcggtgatgatgacgtcgtactcgttttcgtgctcgggcaagaacttgaacccgtccccgatgaaaacggtgaccttggggtccttgaagatggccgacatgtgcgggaggtactctttcgagaccctgacgacggcctcatcgatatcacacagggtgacgtgcttgacggtcgagtgcttcaagacttccctgatcacaccaccgtcaccacctccgatgacgaggacgttttcggggttggggtgggaggccatgggcaagtgggtgatcatctcttggtaagagaattcgtcacgctccgtgcactggatgacaccgtccaggatgaggacgttgccgtaggtagaggatcggaagacgaggacgtcctggtagagagatttctcggtgtgcaggatctcttcgaccttgagcgtcatggcctggcctgtgtggacgagcgcggggggggcaggttccaatccggatcgaaagcggtgtcagttccgggaggtgtcggtcggcgtttgtgcatggggtgcacgagtgtgagacttaccaggccattgagagttgatctccctgaaccagccgtctgcgagtcgcacgaggatggatgcgtgaattagcgatacgttctcttcacaaagtcgagcggtctttttgctcttgatcgacgagcagctcttcggccggtcgacccgaaagaagcagaagaagaacgaccacctgtcgatcctatggacgacgcgaaactcaccgacgactgaagggtgggtaagaggagccatggtgataaaagtcgacctaaattgagtgtttgctgctcttgtatgagctgcttttgatagtcgacctgtgatgaaccttttgaacatgcacggatgggggtgtatgggagtgacatgatatggcgattgcaggtgacccctctgtgagtttgtgaatttccccactcaaccaaccacgggaaacgggaaacacggacatgacggggacggacatacacaaacacaaacacggacatacaggggagggcagggcagggtggacgcgcggacatgacgtaagtaaacagaaaatagcaggatgtccgtgaacccctcgtcctgcccctgctgacatcttacgtcatcaaccgtttgtctccaaggcggtgcatcatcatcatcatatcaagaagctattaacatctgtttgatcgacctacttgccctgccataatagatgacaacttgaaaacaaccacgacacctcactacccccaccctgaccacaccactcgcccacgctgtcatacttgctccgtacaactctcctcgccagcttggtctttatctgcatcacctcgttcatctccctcgcaaacgtggtcaaacgagacgacatgagacgattcctcgacaagctcggtcatggtggacaacacgatcaacagcagcagcaaccgcagcaacagcaacagtgggaccatcagggaatgtacgcggctcaacctcatcaggcgtaccagcaacaacaaaccggtggaggtccccctcccatcccgcagcgaccgcagcagcagcagcaggggaaacgtagcgtcggctattatgtgagtcgtacgctcgtccttcccgcgatgatgtcgtgctcactcgccctcataattctttcgttacatcgatagaccaactggtgagcccgtattcttatccaggaaacaaggaaaaccatagcgagcgctagtctggtgggcttggagatgtgaacaagagacaggaggggggggtggtggtggtggtggtcgagcctgtacatgcggcgggggctgcgaatactgttgctgcgccggcggttgttgctgatgcggtggaggtgctgctaccatctggttctaaacgcgaccgaaccgagatacgatcagcgtcgatcctcacaggtatcgaaatacacatggcaagatggaggagattgggttcgtcgtttttcggctcagaaggaaggcaacggaaacatccacatgggttttgcgctctcggacgtcacgcccgaaggcactttacatccgaaaaatacttcatcatagaatgaaacgacgaggaaagagatggagagagagaaagaaacgcaaggcggacactcacgctttgacgaatggccgggtcatcgggcaaggtctgagatgcaggtggtgcggtaggttcgatggccaggtcgagaatgtcgttgacggtaaagaccacgacggggtgaacacgatcgagcatggggggaatgaattgcgccgcaggtcggtcttccgtacccatgctggagactgtcatcgtggttgtgcaggtcagacactagctagaggcatacggcaggaagagatcgaactcgccattctgcagagtcatggttccctgagtgctgtcgatcgaatggaccgtgcctcggtaccgcagttgagccctcgacgtgagcgagattttcatcctggaacggatgaataaaattaagatcaggacgcggtcgacatcgagtatcgctttgtacaaaatgaacttacccgatgaattgctcggtcatgatgggcagtcgtcaggatacagtgtcgaatgagaagggggagggggagaaagtcgaagaaaagggaaacgagtgttggatgtagagaggatctacttgtacaggggacttcacaacattacgatgttggaggtgaagatcgggtagagatgtgtggtgtaaataagttaagagtgacgagatcgaagtcacctcgacccatcttgtagtcacgggacgaggacgtgtcgtgttgtgagcaaaaacgtccgcggtcatgtaacaagcgcaatcagagagaaccactgcatgctgcatgcgcttctgggtgacattgacaacgtaagaaagggcaaaaacgagtatgcgttgcagaacgctacacgagcgagaaaggtaaacacgctcgatgagggcaaaaagaatactcccgctgaggcttgaactcaggaccttatgcgctttacaagttaaggcttgttaagcatacgcgctaccaactgcgccacaagagcggatatgtttgggtctcttctgatgcaatcagtgcaaactactagcatgagagatgcggctggatgtacccccgtttcggccgcctatatgcgcgcacttcattccgtcttcgtgatcttgtgtcatctcactcgggtcaggagaggacgatccaaccctgtgtctgtctatcccgacagcgataaggtatctcagagtgacactgagtatactttcctccaggctgccggccgacattcatactgaaacgcgaaatctcgccttgatgtctgaccaacgctttcattcgtaatcagattagcgggcagttcggccatccatcattcgcaatcaccgatcaccgatgtcaagatcgatcacgtccaggggtatatcaactttcttcatcggagtgtgttcttaggagaacactttgtgcagtcaagggttgttcgtgaagtggttcctacaccaagtaaatcgctggacatctcacttcccaatcacccatatccatactgtatctgatcctactagagacgccacaagttgatcacagccaaggtggacgaggtcatcaggtggtaccctccaacgcatccaagtcgaactcgtgtacgtctagctgaaagactttccgagaacgagaagccggtatcgacctggatcagcgttgatttgcaagccgtaccctgggccttctgatcaggtcgaagggcgaaccgaaatcggcaggtccaggatttgtcaggatcgagatcaacgatgtgacacgagcatttgcaagtgagagggcggggcaagctcccacggagttcaaccagaccacaggtagaggtagatcaaccacacgccttgagagaaagatggcatccgttgctgatgagtcagttcggacttagcgacaccgcaatgggccttcagttcaggatctgtggaacgggatccaagacgagattgaagacaggggcactcgggaaagtcacaatcgcagcgatgacagcttcgaggatggtgtcgccgacgaacctatcgacagcgagcgggatggcgaggccgtaagtacccgtacgcctacttggccacgttgcgaaggtgggcaaaagttagtactcccccgattcaggtcgctgaagtcgccgggcatcctggcgatcgattagtgaggaaaatggctaccgtgactcccgtggaatcgcctggacgtcagcttctctgcgcgatgtggcactcgtcaagaagacgaatcgcatcagcacatcaacacatccggcagggacggcggccgcgacctggatggctctgtggttcgatgacatgagctttttattcttgtcaactgagccgagcattgcgacaacttacttcacaggaatacgagctgcagccgcacgaacgttggcaggtcgggtagcaatcacaggacgggtaccgatggcgggggcagcgcttttgcgtgacaacatcctcttgatgtagatattaagcgggtattgactgggtaggattgattatatgtctggcagagacggcgttcccgtcagcctaatgtccagagccaaaccgggaatgaaaccgatgcaatcaattactcacaggtctttggtatcaagattatagaattctcgaaaggatcaagaatgaggtggagtggaagtaggtggacttctttggtactcgggcagccgctatacctgacctgccccgtttcggttgttccggtacggtacagatacgtaggacaggctatgggtgtgagcgaagcggatgcaggcgtggcgagaccggaagataccaggtttccttggatgatctctaacgaggaaaagggtgccgacatcacgaataaagccaacaggaggaagaatgaccaggagttttcagccttgaagagaaacccgagcgacatcaaaccgagcgacatcaaaaagatacagaaagagctagacagggaaaaagaactcagattcgaagccgaaagggagttgagatatgtcaaatatgagctgaaggtaagctctgcggatcacctcgcgagcccccgaaagggttttcacgatactgcgccaccatagttggctcgaagcaaaccttttcaaagcttgaaggtcataaagttgatgaacgcaaggcggatgaaacgtcaagcgaccggctgggcagacaacaaagcctcgggttcactccggccatggactcgccaactcaccaagatcgagcttgatgactgatgggaatgcggtttcagcgttctcaagtcctgagaacgctggaggtcctatttatacggaatctttctctcacaatctgtattgcacacctcgagcatgtcgagaagctctggtagtccagtctgcacattgccacaccatcacaattgcggagcgttgtcatgtctgcaacaattcgtaatctattcttacgaggctttcgcgtcaacgccagtgtttggctgtgcaagtttctgcgcctcgagcgatcgcgacctgaacactttgtgttgttgaatcagcacgacgacaagtctacttgaatgtcatgtatcggtgtgcatatcctgatacatcatcatctatgccttttgcgagcccttcttcttgacagcgccggtcttggccgacttgctctttttgagcttgatacctttggtgaaagcggaggattcgggcaggcttcgaccaatattgtcttccttcttgacggcaaagattcgcacgatccagttctctgacgtaaaggcctcctctgcgagatgtcaaaaagccgggtcagccatgtttgtcgggacgcagcctgaccccatgtgccaaacttaccgatgacattgagatcgatcgggttgttgggaatgacctgttgtcgaacccggtcgacggcttgaccgcctccgaacagctcagcgaagctgagtcgcacggaaatcatactcagtagatatcctggatcgatccggtcaagaacagactcaccggtagtaagacatcttgtacatcaaactattcttcatagtaggagagctgtgggcgggatcgagaatatatcagccgtgtgcaagtggcagacacggaacacgcggaagctcacgccgacgcgtccatcttgtactctccccgaggggtaaagtaggacggttcctggatctcatcgggccagattccctgcgagatcctgaccatccacaagaacttgttgatgtcgtcactgtatgtcgtccgacatgatgaggactctgtcagcttgtgtgcctttgagcgttacaataactcgtcgcgactgaccccgagtacccgatgagaccaccaaagatgaccaagaggtaatcgacgtcgtgtttcctcaagatcgggtaggcagttgcctcgtcggtggccatgatctttccgacagtggcaatgtgggctgtgagcgcgagaaaaggggggtcagtccggtcgtctggcaatttggtaagagacatgcgtatgactcactgttgttccaggtatctaaatgtggtgcacgagccgtatacaatcagctgccatcggacagagcacatgcaaacacaaaaccgcggcttactgttgtcgaccaacgtggtcctgttactaaaccctgcgatctggtacccgtaatcccaccacgaagcgatgactgcatcctcttcggtattctctctcaaccacttgtaagccgatctgaaatcgtcaatcacggcgggactcccatccgcgttcctcgaggcgaggacgaccgagggggacgagtaggcgttcgaggtgacccaggtgcagtggtacacgaacatgatgagcgagaggacgagcggggtgagcacgacgagccgggtgtcgagtccgtagattcccggtttcgaggccttgatcttgtccgcgtaagccctaggggtctttttctgtcccttgtcgtcgatgatcgtagcgtccgggtcggtatcgacgtcgatcgtggggatgaccgggtccatgtacgtctttaacaatttcgaaaacgccatggccgcagaaacgctaaaaaaccggccaatcatcagcgacccctcggtttgcttgtccttcggcgcgccggatcgacgggcgagatgcttaccagacgaccggggtgatgaccaacatcaacctgaccatgactccggcaaagtatgaactgagcacggcgtagatgatgatgaagaggtgctcatccctcaattccctgaagcacaagaagactccggcagggaagaggaagatgagcatctcgaggtcaaagaagaaggaaggccaggcggtaggttgatgttccgagaccgaggcgatgatgggaactgcatggtaccgcatcgtgtcacatccggtcagccatcgatgatcgggtcgcagcgggaaagccccgaccggcatggccgagtctggtactcactgtgaatcttggcataccccgtgtcccagagagagtagaatctgcccgtccacggcgcgatccacccgctcgtggtcaagagaacgagcacggcgagggcggcggtgaaggcgagtacgacaaacgtcctcaagaggaactggaactgcttgtccggtaccaatcgacgaacgacgtgcacaaaggcgacgagttgcaacagtccgaacacgcctgggagcgaggtgcgaggtcgaccgcatgggaatcagcgtggtttcccgagtcgtctgagcgaatgcgacgtcagactgaatgcactcaccaagggctgccatgtgctcgctcgtcctgaccggcaagaaccctacaaagggtacctgcatgctcgccaacgtcccgatgacgtaccagctcgagtacgctgtatagatccggttgctgaacctccccatgaggatcaagacgaacacgtgtaggggcaccatgttggtgatgaaaacgtaacctccccaggcggcgaccatccatccgtagaacatggcggcgagggtcgagtaaaaggcggaacccgtcttgagcgccttgatccagaggtaaaaagtgaacatgaggaggaagatggcgattgcttcgttgtcgtatgaaccggccacggatcgggagatgtagcctgtatgatcgtcacggttgagtgggaaccaggtcagtccggttgcctaagacgtgtttcgagatcggtctctacgcaagacttacccggcacgattccgataaacgcagcggccaagagtcctgtactctcgtccgccatctcgcacgtgaacctgctcgatgaacacatcagtcggcttggactctaccatcttcgtttcgagtcactggcactcacaggtaagtcgcccatgccgtcaacccggcgaaagctggggcgagcatcacacagacgttcctgatatccacggggaagttgaggtagtgcaacacgttgtaaatgattcccgaggtgaccatgagtcctgggtagatggtacccccgaccactcggccgaggggataccatgcggtcgggtcgaaccagttccagaattcctggagatgagcgggaagaggtaaggcaggtcgagtgttcgacattgtcagtgcggaatttgcggccaaagaaggaccgcttctaatccgcgtgcatgctcacatagaacccctcgttgacgagcaccttgctggcacggtagttgaaccaagggtcgaattcgtgaatgatgctctcgtgtctgacgacggcgaacaacctgctagcgatggcagcggccgagatgacggtgaggatggtgaacctgagcaatgccgaggtgttgatcagggtggtcttgctgaccctagggatggggtaggcgagcttgacacccggggtcagcggggtggggggtgtagacgtggacatgaggtcggaagggacctagtccagcgcgtttttcgatgatcggcacgagagaggggaggtgcttgtggaattctcgattttgatatggtataccgggttttgtgtgattgtgaaccggtgggtgaagagtagtgtatcagtagtagtgtatggcatgacagctgtacgaccctaggtcaaagggtcgaggccgtgtcccatgtcatctcattgctcatcgtttgacgcgcgcgacgagtctcacctcgagcagcgagtagtcaactactactacttactacttggtcaatagacttgatctgcaaatatatccacacctcttcctctcgctcgttactagtatcgatcaccatcatcacaacttcctaccaatcatgtcaggaagagtgagtagcagtcccattctccgctctctttcatcatcgtggctgacctcgaccacactacacctcgccgtcagggtcaaccccgaggctcaacccgaggctcatcctcctcgaacgctccttcttcccgtggaggtgcatccacccgtggcggtggtcgcggaggtggaaacgccggcaatgcagcaggtggagaaaggcagaagaaggaggccatcctgaatctggcaaagtaccaggacaaggaagtcagggttaaatttcagggcggaagggaaggtgagtcgaacggtcgacatgtctgggttgcgtcgaagagggggttgcaaaaggagggaggtccggcactcctgggtctcggtcgttatcgggctgcacctcgtcatcattaaaattcaaagcgtaccaacgaacaactcggtttcgactacgggacctcgaccctgcccgttcctcatcctcaacccgatcacgagccatcacctatgacacaccacatccctatcctatcgcccaaccttccacctctagcaaacatcccttgatacggaccagctcgaacccgctacggaatcgaccatattccagagcatagacccgatctggcccgtctgatgaaaagatcggaacgaggaccgggtccggcgtgatacgctcatgcgcacgttcatttcaatcgggaatcgagataagcgtcgagaatacatcgcttctttccgttccccacgcaaggtggagaacctgggatcgagcaggattagagacaggaatccagacctggatctgaatctgggtcgacatcgaaaaacacgcactcgagaaaaaaaaatcctcggggtgatcctctcagggctaggacggtcgaggcgcagggtgggatccatagacggatggattggggagagatgtcatgagctggacgcaacttgagaacggtcgacgagcccttgaacgccagaaggtgaaggaaggactcgtcgcggattggaaacagtgattgaagagagaatccctcgctcaagaaagcgagcaggcgaaggcaaggggaggatgtcagtgacacccggcagactacctggtagaaaaatcgcaaagcggcgttactttgctagcaaaataggtcggcgcagagttgtggacggtcggacaatcgatcaggtcgcttcgagagtagactgagagaaggtcgaacctcgaagggagaaaacacgcgccgatttgatcgtgtttgtgacatggatacgagcctagtcgggaggcttggtgttgtggaagagcgacacacttggatctgctcggatgatctgacattcctttcctcgggccctttcttcaacaccctcatttcgtgttctgggatcggaccggttggacgtggatgtctgaagttgatccgcgaatccgagctgacaccttcgctgtctctcccctgttactgtcatcccccctttgctccgcggacaacggccgcccgcacgaacttcggaaaaaaaacttgtcctacccaacaccacagtcgttggaatcctcaaggggttcgacgcgctgcaaaacttggttctggacgacgtcaaggaagaaggtaccggtgagtcgaatgtgtacctcgtcgtctaggtggtcgtcctgggtccgactgtttgtccactttgactgacccctcttgatctactgctgcccttcatccgtcctcccgactcgcttgacactcgatcgcaatccgtgcgttactgggatctttgtgcacgcccacccacgcgaggatagacggtcgaccatcgcggacgctcgggttggtcgtgcttcgaggcccgcagatcacgctcatcagcccgacggacggatacgaaggtgggtctgcccaaaccataatcccggctatatcccgatgactgacgattcgattcgtgcgctggatgtctcgctgatgtttcacagagatctcgaaccctttcgctcaggccgaatagaggcaagaggcggagaatgcgcgggtctggaggcaagatcgatttgtataccagtcgtaatgaaaaatacgagcgatggcgccgagactcacagggatggctccacactttccgtcgactctcctccctctggaggctgtagtctagatcgccgcctgcagcctaaagttattccgctatcaacgatgccgttcgacgcagtgactgcttcgtcaaaggtttgtcttgggcatagctcaaggtaacgagcgacggcccatcgatcagagtcggccgaataggtccgcggtaaactcacgcggtccattgtcgtatcagtgaggaaaaaatcatcgacggaggtgggccaggcacacagcagaaatcagtatgcctggatacacggccaagtaaggtgccgcccagaccatgtcatgtgcggcatatgtttgacccagcgatggtgaccgataatattgtcaacaaaggcagaggcgggggtgctaaatcacttaggcaagctgtacgctggtatacacggggaccctgcaaatacggccagtgtccgagatatatcgcagtatcattgcctcgtgctcttctgatcaacgacctctgatgagatgtcgtcgcgtatcagattgacgagggtaaccccggtaaaatcccgggccggaccggctccccttccccccccttctccctgcccgctcgcaccggtgatgaccgagccgggtgaatcacggaaacgtggaagctgcttggaccaccgacatcgatgatgatataacggccattcgttggtaagaaccgatacggccacagatacagatacagcacagagattgtacagttctactgaaaagtcgaggcgaaacacacgatgagtacagaaacgacgtcgtcccagctagccgactctgcgcgtatcctcgtctcgacgcatgggaaacacattcacctgctctcgttacccccctcaccgtcgaccgacctccgactcgtctcctcgctcgagctagaccagcaaccgtcgtactcgctacgtcatccacatatccctggcttgatctatgtctcggcctggatcccggatttgatcttcctggtccaggttcgcggggatgagctgatcaagctgggcgagacggaggcgggtgggggcggaccgacgtatttcgtcatgacgccggataggaagagtctcttggtagccaacgtgagtacctttccggtctgatcctccattctttagtcctctgaccggattcgttgcgttacctgttcggcttcagtatcgttccggcgcagtaactcgaatttcgatcaaccctcaaacgggacactttgatctcccccatccgcctgccaaggatatcctgcaactcccgtcgaaggccgctggacccgctagatcccgaagactggaagtcaggcaagattctgcacacgctcatcaaatcatccctatccccgctgctacttcctcgtctgcctccacgagggcggcggaagaatacctcgtctgtgatctaggatcggacaagatctacgtcgtcacttattctgaagagtccgggtgggatatcgtcagcgtttacgagaccacgccaggatatggacctcgacatgccgcgataaagacgatctccagcagcccagccgcatcgactgtgagaccggacgaacctgaagtcgccgaactggccgtctacgtcgtgaacgagctctcgtgcatgatcaccgggcataaagtcttgcggaacccgacaagactttcgaccccctttttcacaccgatctcgaccttgccgcccgtcgaccacgtgtcgggtaccggttcaaggatcgacctcgaagggtacacaccgcaagaccctatggaaaccatcgcgtgtgcgatcctcctcgtcccctcgtcctccaacgctgggaccgattcacaggaactgctggtgaccaaccgaaacctccccctggagatcagtcccgagcgagacccctggtccgtcttcccacttgggccttcgggggagatcgacggaccagggaggttctactttggcgcgggaagacatttgagaggggtcgggctggagaagcgggacccggccaggttattgatcgccagtagggagggggatgggtttaccctgtatcagcaatcgaaggacaaacgcgaagagacgggcgggtgggaagagctgggaaggggtttgttgcaggatgaaaaggagatcgagttaccgctcgcgatcgattggttgtaacgtagcgcaactcaggtctatatgtatacccattactacagatttcgaaacacccctatggacagcttggcgataaaatatcgatccgtcgactggctgctcgttccctactgctgtgatgcgacggacactacctgatcacttctacccccacggtttcgaatgtgtgcgtctttgcgacaagcgccagcccgcattcagactatggacaggttggatggatataatttatacctgcaaggaggatggtcttgcccgtctcgtatactcgttctagtgcgcgccttggtcgacttcgacccgagagttggggttacatattgcatcgtccaggggttccagatttttgggattgctcaccaacgcgggagtggcgggtaacgtataaggtggcgaaacatattctgtacagagcggagctagacccgttatcataagacgatgaacatacttttcctcgtcacctacgtcgaaaccggatccagaccgacgatcgatgcgtccgacgcgatcaggtgttatgatcgaggaaaagaaaacgcgtataatggcgagtacaatggtgtagtggttaaggggtagtaccctaaaccaggagaccagaagttaagcaactcctcaattcggtacagacccactaccttgcttcctagtgaagcctgctagggtggggcatgattggattgaaggggggaagttcgcttagaactttttgtatcttagaattggctaggtgtgctgatacggcagtaatgttgttttttgttcgcccacctcgcttgaaaagtaggtcgaggtcagggatgacatgtagaggtcgtgcgttcgatttctgggtatattcacactttttcggctcgcgcgcggggggagttggcgttgacggcttccttaaatctgacagagacgcgtgagaatcatttgatcacactcacactctcggattattacccccccgtcagacctgaccctcctctacgcgtcctctctctctctccttacaccccatctctcctctccctctgagcccatgaatcgtatcacacacacgactcgatacaagtcctcctgaactacgcagctcaagtgtaaaatcgtgctcacagatcttactgtcgactgcgtctgcattataactactcgcctggtataccgactgaactcgaccaacatctcgactccgacacatcgggcatcgaaggcttcctttcgaccttcgatcttcaatctccagtatcgacgttgtcgaccttgacatagagaccgaagatcctcgaggtattctatataaaggaagcggtaagacctcgtccctccattcctggatcgccaagtttccatctggatcgacggagaaagtaattggcaacacgacacgcgatccgcgggtcggtaaaagtcttattcaaagttttccccgccgatgacctgtcttgttaggaatgccgaattcctagacgaaatctaccagtcaggcgcatctccgttcatgggatcctctcggccatcggaccaaactgcctctgcacctcaaatcgtcgaccaggacttggaaactttccaggctaccgcatcaggtcactctcatgagtcatcacactctcacagtcactcgcatgctacgccccattcgcacgctcacgggaatcagcaccacgctgacccggtaccccagctcatctcgaccaatccgcctacgacaaccaccttgaacgacacccagagatccacgctcaagattcaacagctcttggaccgacactctggcctacagaagcaagccaagaaggacaacaatatggacaaggtcagaagcactttgaggcagatgatcagggattggagcgatgcagtacgtttcacctggtgacgcccacgccatctcataccggtgttcatcgacccaactcgtctacagggcgcgatggaacgcgaaaagacctacaagccttgtttggacgcggtcgaagaacactttagccatattccagaagaagatcggtcggtctaaactgtcattgtgtgcgcaagtccgaccgactgaaaccgaattcctggggtaaacatagatcgagcgtcaaagtcctcgttcctggagccggtctgggtcggatggcactggagtttgcgcaccgaggtgggtctggccgtggtaccgaagatataccaaagactcgatctgacgtgacgatggtttgatcgccaaggcttcgccgcccaagggaacgagtttagcgctcacatgctcgtcacctccaactgggtcttgaacgagtgagtctcatggccaaagttctgcaaaaaaaataagacttgacatccggttcgtgttcttcgcaggagctcgacagtcggccaatttcagatcttccccaaccttcattctttctcgaaccatttgacgacccatactcatctccttcggccttacctcgtacccgacgtgctacccggtcagctattgggcccaaactctgatttcagctttgtcgccggcgatttcgaagaggtctacggaggccgggctgaggacggtagctggggtgacataccggccgaccaggctggacaatggggagcagtcgtcacctgcttcttcttggacacggctaggaacattatcaattaccttaaaattatcaagggattgctgcgaccagatggagtctgggtgaacgttggaccattgttgtggcactgggaaaacgtccaggacagggaacgaggtgagggtagcatcgagctcagcctggacgaggtcaaagaccttgcacgcaaaatgggattcgagatccatgtgggtcgtgacttttgaatctggatagcacgaccgatactaatgggctatctgagacgatagaacgaaaggctggatcgggccacgtacacgggcgatccagataccatgttaaagtcggaatatcaggtgggagtggttgtgcggtgtaatgtgttaacatccaatctgagccgtccctttcttcaacagatcgccttctggaccgcgaccaaagtggaagcctagttgagtggtggtcaaaaggagcattggattatgataaaagtagaattccatgcaatgttcagaccggcaacacgatccttctagacatcctgctcaagtgctctccttccaggcgtcttcgagtccccatcgttcacgtccttctgcagtcatgacgttgatgcagatccctcggcctgcgtccaggagcgtccaatccgagtctgggttgttcgatcgaggtagatttgggcgtttatccgggttgcgaggccgagcagggccgttcattgggttgtaatgtagctgcagatacgaggttaggaccattgacaagccggaatactgagtccggataattgctcacaaattctcggatgctgcgttctcctcggccgacctggaaggcagaagtaacaaggttgtcgcggccaaatcagaacatttgtgcctcgctatcgaactgcgatgaactcaccgctcctttacctcgagccgcgacctgcgcgacaatgacccagtcccagaacgccccgacttcgtggcccggaatgacgatcccttccccgctatccgacttgctccgtctgcgtttccccctctctggttgaggattcggaaactcggcgaccgattttgatgcctttgagcctttcgtcctattgaaactgatcgagtggggaacaaacagctcgttctctgtcaaaaaggcgtgtaggggtctggcaaagtccgggacgtcttgaggaagcggctgaagagggatatcggcggcgggttcgggaagggtggtcatggggttgtaggttgtaaagaccgggcccgtcgacgatgatcgggaccctgacgcttggtccacatcgtcctcttcctcgaggtaccaggctttggctttggcttccgccactcgggaacgttgactagcttgggaagaggactcggaggctgggatttcggcgttgcgaagcggcggtgcgcaagcgtggagacgacgaaatcctagttggcggacggccggatgtacggctcttgctatacgggcggtcatcgtgctgttgaatgtgcaaacaagattcgaggctgcttgaccaaagagcaagtgcaggtatgcagtaatccagtgagctcgttccgatctgaacaaatgctgagggggacgtggtcctatccaagttcaacgacatatccgcaaaagttgtcaagatcgcgcgaaagtcagaggatcgcgctaagaaggcttgcggcaattgccctgagagaagggatacttcgtcatcatctggcatctcatcggaaaaggacgagcagctgtcgtcgacacggcgaggtcggtctaatttctgcctgaactgacacgtctccgtccatgaaacatgttcccagcaaggcaaagccgagccgatggcaggccagtgtaccgtcacgatatcccggcatctcagatagcacagctacggcccattaaacaccaaaattcagaatgagcgcaaatcgatcatctcgctcagccgtccgatggaagagaaacctttctggaggcttttcttgagttgtgcatgcccaagaccattggacttttaagcaatacgctcatcaccaacgcccttgctcaagtcgacggccttagagcagctcatgcaacgtcatgtttcgtttgtgacctcggactcgtcgtttaccacctccaccctccccctttgccgccatctcgtctcgacctccaccttgttgtccaaccttcgacatactgcgaatgtcaagtcacaactttacaacttgctctcgaatacggctcctaccttttagacttctgcgcataatctcggctcagactgcttgccaaccttagtatggccgtataccacccataggctcataatgcgtgagatatagctagctttccgacccacaccctttctcgaacggcgatcctttcaacaatgatccgcctccactttggcctgcctgatcgcaatgtcatagcctgcttgctaccaccggtcattgctgcactcctgtcttgcgtcttcattaccgttcgacccatcgccgacctgtcgggaagtttcgctttcttggtctcaaccctgcaattcttatacttttatccggccggtaccctcagcaccttgattgagagcagcggtaagtcgcccgacttgatgtggctcttcactctcttggtcgccgactcatacgactgtgatggctcgtagctctttgtttcctcggcggtattgtggctttagcatattcggatctttttctctacttcgctctgctctgcaaccggcggttgtctcttcccgatggtgaagcgggcgagacaatcgaagctagggtcgtctgcgctttcggtctggtgataatagcactcgtttgtaagtcgattcaaaacagccctcatgactgggtttgaacgctgacgcaagacctcggatgacagccggatggatccggtcaacctcgcctcgactcgtcaacgcttctcggatcctactcttccataccatttggacgctggtaggcacgagcagtatcagagaagtggggctcggcatgagaaacttggtggaatgtgcagtagctcatcgacttgttgccatgttacagttcacgtccgaccgatttctacacctcttctatcccaccctttggtccgcccttctctccataatcagtctcgtaatcggacacagcatactaccacctgagcgcaaacgactcaatgacatactcggggaggctttgaaaggcctagcggacggcattcgcggtcacggcgtcatgcaaaacactgcatctcgtcgacctcggacattatctgacggcggtccggacggggtagaagaggaacgcgaagatgaaagcaacgagtcgacaactccgactgcatattcgcctcccgcgcagatcgaagaaagcagggaagccatagacgaggcggagaggacggtgacaaagccgaaatatcgcccgttggtctcgctcctcccgatcatccgtgaacactattcgacagccttgcacggtatcacatacgattccatgtcgacacgtcgtctgagaccaattctcactatcctctacacccatatcggacggaacccggtcgtcaaagacctcgccaagaacacgtctggcgaattttctttccagcttcaatctggaaacggaaaggagcagctcaaggagagtctcgatgggatcagggaattgatatcattggctatcgaggatgcgttgagatcgatccgggaagcatatgattggcatcaggacgatagcgattcgcgcaagaatcttggcgggccgctcgggttttggcagaatcacgtcgtatcccacaagacgcgttccagaaaagccggcgaacccgctgatccccgaaggcgcctggctagctcacaagagtctcttctgaacgcgacctggacgtacgagcacgatcttctcacctggctcgagacgggtttcttttctcagccaaagatggggagggcgatcacggaacgcgagatgaaggagttatcgagccgcgatatcgccaggatgctcttcaagcgtgataaagtccggggtcgtcgaggcaaccatacggaagactcgacagggaccgctaccccggttgatggcgatgtcgccctgagcaaagaggacatcgctaaagtacaggaagaacgcgtcaaggcggcggcttggctggtcgcgattctcgatgtgagtgaggaattggggccagtggttttgcagccatctgatctcctgctggtctgttgagcagcttgcaaaggacgtcagcttgctctgtaatgcgacgagagatctgttgaattttgcctgccagaacagcaaggacgggcatttcgtattgaaaagcaaacgattctacttccccttgttcgatttggcttggttagagcgaagtacgatacaagcaggtttacagtcggatcgctggactcaggaaattcgaggtgagtgttcgccagcaacgcctggtccagcggtgcagctgtctaataaagtctcgtctcagaaaccgcgcgtggagacgttgatgatgctgaggctcgtgaagaagcgcgggaggcagcacagcacgaagaacaattggcccggcaattgtcgcggcatcagcggcgtaattcggagcgagaagacgacgagaagtcagccatccgcaagcagatgcgcaaacggagaacaaagtggaaagatcttgttccccggcttaagctgatgtatgctaagtggtgggaatcggatagtacgctgtcaagtacgtcgatgagatggcaataaaagcttcgttcgattgcggctcatcgacctgcgaatgactggctttcaggaagactgacgatatcgagagctctctcggagttcaagcattcgcggcacatacaatacgctttcaagctagcattgggtgtaatgctattgtcattacctgggctgctgcctttaggaagccacagtcagtcgttaatggacaccggcctgcccacaacgcgtcgcatcgatcctgacattccaacgcttctcgtaggtagagaatactttgtctcggcaagaggtcaatgggtaggtcgagttgagagacagcttggaaactgcttcgctgatgtcgatacacccattctcgacggtaatcagtctgttatcagctagtacgtactggtatatcgtcatgcgcctacaataagcactgatcgcctggtgccttgcagcatgtatgttctggatgtgaccacaggggccactttcagattgggcgtctggcgagtcatagggactgtcagcggggcgatcgtcggctacgtcgtgagtggtgggaggatcaatgtcttctgagaatgccgattgaccttttaatttgatcactcgcagggttatgtcatgtcaaggggaactccttacggtctcagcgcagtgtcaacggtagctagcttaccaatcgcttggatcatgctgttctcgagtacacctggcatcggcatcgttgcgtgagtttctggtctcccgctgcgatctaggatcagctgctgagatgtctccctgattagtggaatcacacttccccctatcttgtttatcccttacctggaacgagagtcgtatcatggcgcgttgatcgttgccctatggcgtgctgcgcaaattgtgatcgggtaagtacttccacgtgcgttgcatagcagacgggttgaccaatttcaacgcgattacagcattgttggggcttttctcgtcaacctcttcgttttcccctatcacgctcgaactcgctatcataaagtcgtcgctcagactttggatactctaggagatctctgtgagtctttctgctgacgtttcgaaccgagactgacttcgctgatccttgtatcccaaagatttgactatgagtcggttagtccgttgtgtagatcaaggatccggcatatcagctgagaatgacttcccaacagtgaaaaccttcgaccatcgttggtaaatcgggttcctggcgaacaatacgcaggattggagcgtagtatcgaggtgaggctcgccatcttgcacaccactcatgacctcagctaagatagtgcggcacagatcggtatcggacagtgtcggtcgttggcaacgattcagcagctcgaactttccctcctcccgaaaccgttctctctgcacgtgcaactcaacaatgacattgccaaaatttacgatctactagtggagatcaggaccatccggcaaggtatcccacggcaagaaacggtacttgatgtgcttccacttcgtcaaaacctggtgtcttccgtctacatcgttctattcgccgtggctcacgctgcccgatcgcggacacctctgccccaattcatgacatcgccggttgaagcagtcaataattgggcgaaagctgttgaagaacacctgaacagtgggtcccggtctcgatcgcgctctcccacgcggcgcggcgaaccggaaggtctgccgggttcgagaacgactagtcccgagctggcagtcctttacgcctgtgctgagcgagaagcactcagccaattgagccactgcatggaagatgtcagtcacttttacctgcgagaacttctgaataacactgatccgatacatattgctatagctcttgaagacggcacgaacgttgttcggagtgcagtctttcctctttcaaccacggctccagcatgcagatgaggaagacattttgtataggtagaagtacgacgcgcaggtcgatccgcttaagcagttgtatatggcaagatccaccaatccatcagcattcatcgttcatttgccgttgtggaaagcccggtagcataaggtgtttgatcgcagctcctactaccggcgcggcggtgctgttgccgactcagctgcccccgggagatggctcttacagcaaaccatgagactttagaagcattaaatccagggaggcacattgaggcaaagtttcacggcaattgcaaatatcgcttagatcgcttcttccagatgatagttaaacattttgttacgatgtggagttttgttgtacaaccgatgcttcactgtcgaggaccggtctcaacagccctctattatgcgtctcaggcgctggcggtggcgacagccgatgccgtcactgccttctttgccggtcttgggcggccccaaacgaccttgccccgtttacccaacacctcgatacccccttgggcggtcaatgaatctgctacccgctcggcaacagtccggtcctggaagattacgaaggcgcagtctgccaaaagccacggaatgacagtcagctctgtcgacggcttggtaatcgagccgccatcaagtcattgctatactactcacggcttgcagcaacaatcgtgatggccttgatctgcttgtcctggatgaatgggcaagcgctcatcaaggacatccgaacgtcgggttcctggcagaccggtagcgtaaggaagatcaaggtagtctatatccaagggattcgcatttatccgactctcgtcaataggattcagtcgtcggatcggcttcaaatgtcccactcacgacgctcttgtcttctgggggtgtgattcccttgctctccgcattctcgcgcagaatcttcttcgctaccgggtcgttctttccgtaatatcggtcctgcaagctctgcttttgcaacccgttttcttccggaatctcgtgtctgaacagatcaagatcgcgtcgtctcagcggggacgagccaaatcacccagcacgccaccgagactcaccggaaagggcactcgttcccccgcttacaatcccccttgaggaagaaactacatatgtgcggtcggttccttttgtagtgagggtccttcctagccatctctttcaacatctccttggcagcagaggaagccaattgcgcgtcgtgtgtatctgccatcatccccgaagacgtattggccatttgctgttccatgacctgggtgtagaattctgcagagagggccatgatggagaggtgatcgagttgagcgagaaaccaagctcgtgcatgctgggagccagtacttacgtttgttgatatcggatgtgggggccgtgttgatccgtccaagagcggcatccctgacctgggtcggcaacccatattcgctattccaccccaacggcacgatcagtcagccccagacagatcatgaattgtagcgtactcctgcgagatgaccgcaacacggcaacgtacaggtcaaggagacatgtctgacacacgttcttgatcttggcgcatgtcgtgcaaatctcggtcttcttgaacctggctccgctaccggggttccatcgaaagacggtaaagggtctaacgcagatctgtcggcgaggcgaaagcaaggagacagcaaccgaggcttagctttccgacttttgagaacggtggatcactgttgattcgttccgacatactttgcactcctttccatattcttgcttgctctgtaagatggcagcaacgcacaggttagcctgcaagttcggatgagggtgagctgcgtgtactctcggcttaccatgcgaacgtaggggttctctcctagacaagtctcgcatctatgcatccagagatatagttgttcagtgctttgtcgatatcaagacgagaccatgcgagccgatttacagaataggaaagtcggactgttccgttccgactttctgtgaagacgtgaagaacgagagcggctcagtgcgagaaggaaagcggtggtgcgagatccaacagacatacgttgagatctcgtttgggaggcatcttgagtggtaattgttcaaaaggttgctggtatcgcactgacagattcgatgcgaactgctagatagaagatgtctaattgtctaatcgatatcgaggtgattgcgaacatgagcgagttggtcacaggaaagaggttcgttcagatttgcttacctaatcatcgagtcgcgctgttcggatccggttcagtggcgttctactccgcaacgcccttgatgagcgatgtgggtggatctgaacgtgttgatgcaagttctagctggttgcctgtcgtctttctccctcctctcacgccgttgccatcaatctcatcaaagtatcgtagaaactgttccaacctttttgatggcgctaggttagagtcgccctccttgtcctgcccttgcccttgggagagggagagagctgttcgccaccttgtcccgttcagagtccaacctcgtacactcggtctggattcgaattgatcatccaacaacatacctcttgtaaccatcgacatctacctgcatcgatatcatcgcctccgtccatcaatcacgtttactcaagcacagcacaagcacactcatctcaatacaacttgaaccttttcaatcttacactgcatctcgcaaatcactcttgtgtaagtgttacgcacggcttgattcttgccgcgagaacggcctcgagctgatcagcttaatctcgtcttggccgtattagtcaactcttgatttcaccgacaatccagtcgagtctcactgcaaacgcactccgtttctatcaatcgagtgagtacaatgccttcatgtttccattctgcgtattatgacaggcgactatccgggctaactccatatttttcgttgagccctattcccgcagcacattacaggtcgtttgacttccacctacaaccccttcacctcaatccctactccaatttttcaagcaagatgagcgccaagtacatgctcgccaagatccccttgttcaggagcaaggaagccgcccgacgggatgctctcctctcgcctgtccaaggattgtacaccaagagcccgaaggctactgccaggctcatcaatcaggagctttcgcctaggtcgatcatgttcctcccgatcattcgcaagcccaaggcggatatcgcgaagaacaccgaggcccagcctgtcgataacaagccaaacagtcacatcgccagacgggatgccgctccgagactcgctgctcgaggtgctgtctcggtcaaccgtgcaagcgatgagccccgatcgatcaaggtcgtcgcacagaagtccactcccgtgaagcgcgtcgtggacagacctagtccggttcgatctaccgtcgacaaggtgacgaagaaggctgaccccaagcctgaggagaagcgcaactggcctaaaagcgcgcccatctttcccgacgtcacctatgcggcgaaagcgggatcccctgcgaggttgccgaccttgacgaggctcactcctggctcggcattcgccaccccggcaaccggatcgacacggaagagcgttcgcttccagggtacgccatttccagcgacgcaggtgacgcctgccgctgtgaaagcctcggcgttgcgaacggagagccgatacccgcttgtcaacccgttctcgaccatgtcgttcggcgcgacaaagccaaagccggttgtccctgaaccggttgaggtggaaaccccgggcctgtttcggctccgggacgagcttcgggtggcacgggagcacagagagcaggaggcacgggaggatacgctgttgtcggcagcgcgaggtaagctctacgagaccgattcagaaacagatcggtttagactgataaacgcgatgctctattgttgcagaccgcccagctcgtcccgaaggttggtggctccatgaggaccaggacgaggaagagttcttggcttctccttcggtcgcgccttcgcagtcgaggctcgaggcctccaagaaggcatcgacatcgctggggagccgaacgcaaagggaagcgcgcgcggctcaaccgaaggaatgtgagtcagatcgattgtcccctttgatttccgcttgtttgagtagaggctgatattatctatgcaacttttcgcctcacccagcccgctccaagagggatgtcagcagtgctcgcgaaagaagcattgggcgaccttcggtccaagaggcaggacaagtagaagatggaagattctacttgccgattccgcctcagctctcggcgatgtcgatcgatgggctcaccaaccgcggccaggcgcagagcaaatcgagcggcatctaccgactcgccaaggctcagctcgctcagtcccagcgctccctctccaggacccaggccaacgcagaggagacctcatccttcgctgcggcatccaaggcaagcgggtctggagcaagcgacgcctcggtctcggcgatccaggaactcagcaaggtcatcgaggccttgcggaagagcgaggacgcgctcaggcacaagctggatctcaaggaacaagagaaccagcaactgcttgagaagcttgggcaccttgagtcgatccatgaggctcaaggtgtgatgctagagcagctcgagaccagcgtgacggagcaatacgaggccaatgtattgctgcttgagcgaagcgcagacctcgagagcgccgaagcgaacctcgaagaggtcatccaggtcgcgacccagctcgaggaagaacgagacgccgccaatgttcaggcgcaagctgtggacacggcgttccgaattgcgatccagcgattcgaagcgatcttcctggaggagactgggcggttcatgccggtggcttgggcggagcacgacgccctagggagccctgactcggagccaatcccgcaggccgaggatgttggagaggagagcagttgggagcggggagagccgtccaacgtgtttgagggggatgacggcctagaggagaagagacgccaggcattgctgcagagaggccagatctgcgagtatgacctggcagtctttatccgacacggcgtcattcgcaaggctgtcgacggagggtacgaaggggttgagccccctcactaccgtgtcagcacgatcccttcggacatgtggtggggagaggaagaggagcccacggtcatcttgaacgatgacgacctcttctagatcccgtcaaccgtccatccacctcccccgcaggttcggcgataatcagcttcaatccatctcggacgagacgagacgaaagttggagaggatctcgggcgggttcaatgccgtcaggtggggggtggcttatgggagtggggtgtttgatcaggtggggtatgatgttggggggagaggcgcgcaggcgtcagggtcggcgtcggcgtcggaagcggggtcgggggtgaaaggagatgatggtcacgccgcaactctgacgacgacgacgacgacgaccaaacccaaagacccacccctcgtagattttctctttgccacctcccacccgtctcatttccacgccatcaacctgcagaaaaaccccgatcattacccgaggcttttcaggtggttgggaccgggcgcgatcgccagggtacaggaatgggcaggaggggtttggttcgtcaccgatgtggacgtcaggttgaacaaggttcaagttgggtcgtcccccaactccaactccaactccgagatgggcccgacctcgacctcgacctcgacctcgaccacggcgtcggaagaaaccgtccgcatcaaatacgggatcatcagtaacgacgccctctgtacagatttgctcgattggacgaccttgtacgtctcgggcaggttacacaaaccggttaggatcgtcaagggacaacaagatcgcagagtcttgctcgcagcgcaggtgaggtcccgattgagggtggacgcagctcagctcgagacctagacctagagctgatattcggctgggttgtcgggtcgctcgtccacgcaggtcaacttgatctcggcgttgagggtcgcgttgcttcaattgccagagacgttcaccgaacgggcgttatgggaacaagtcgccgggatcagttatagcggtcagtaccagtaccaacctcggcgtcgagcctcttggtccagcggtaactaaacaagacatgggactgacaagcttttttgacggatcgtcggttgaccctcctgtcataggcgacccgaggatgtccatccccggggcggaaaatccgaacaaggtgaaaaatatcgtcgccccgcagatgcaccgtttcagaggtttgtacggcaggttgctacatggtatgggtggggtacgtgccgaggacgaggagaagatgaggacggcgaggttgggcgatgtgggtggcccagaggaagaaaagagggagagggaggaggcgtggagaaagtgtggattgggagtcgatggtggggaaggcgtattgagggtgagtcccgttcccgaggtatccgccactcgctcagctcgctgaccggtgtttcgagttcactgtcgatagcaagacaagagcgtcgcctaccgagcggaactgttggccaaactccctcgcacgctgagacgctccatcgccacgcattactgcacccagttcaacgtgcaaatgctgaaaccgggggaagaaccccaggtcgacgggccgacggcgttgtcgagcgacgaattctggaaacgggtcgccggggtggacgaaacggaattgcgtggggtcttgagtcgaggtgagtctggtttggcgcgcgagtgtcagacagggcttgaatgctaacgccttatcctcccgcctcagctctcaagagcatcatgggaaagccggcattgaggcagagcttcaaggggttgttgaccgctggattcacgaaaagcatggtctacgccgggcgtaaagtcggcaagtggtggaaagccaaggtgggttcgaggcagagattgacgggaggacgctgcgcctgacgatttggatgtgacaaagtcttcatcgccgcagttgcagggagtgcggtcaatgtccacgagtagtttgagggtgagcacgatcgaaagtcgattcgtgcaaacgcttctgacaccaagcttccacaggttacccgacggggactctcaggttaccagcagatccgatacgcctcgaacaataccaaaatcgtacgcgacggagcgatcccatacaggaccgtacagctcgtctcgtccgaggacaactcgcttggacctccacaatcgttagcctcgatcctgtcatcatattcgacacgcacgcactacctgcatctcgtctcgagcgatccacccatcgtcaaactgatcgagaagaaggctcagcaggaaaagtcggtgatgcaggaaaaaaaggccaaggcgaagcgtgccagggtcatggagacaagcgaagtgcagatcacgtgggaaagcgcgaagggcgacttgatgcacaagatcgcgctcgtccgtggtatcctcgaaagaggcgaccgggtcgaaattgcttttattcacaaacctgccaatacggggaatttgttggccggggcggcgctgaaaagggtacaagagacgttcccagcgaccaccaaatcggagcttgctgatgtagcaaaggagtggaaggacgaccggatagaaccggccatccgggtcatctacctcgagccgacaaaagaagtccgggacgaggttctgagaaagctggacgagtcggcagacgaaaagaacaatttgaaacaggcgaaaaaggcagagaggcgggccaaggaagaggaaaggatgaagcgtgccaaggcgagggaggggtgaggggcgcgcgacagttcagcccaacaaatacgaaaagcacgccaaagaggctggctcccaatgcatacgacacttagcatgcggttattgtgataaaattgtaagagtggtgagaaggtggcttacaatatccatacatatgatgatgatggcgcgaagaaagtcaagatccgaacatgggcccgcttgagtgtatcatgatttcgagtcgacgatcgcgttcgcgggccgtgtcgtgtctagaatgatcttggagggcttttctcgcgacaaatttgcgagagctgctacgtctagcgagtcctcattattgtagaatgagtatcaccttgagtttggtgctcgactgatcgccagcaacccttggatgcggttggaagtggccatcatctcacgatggtttcccttgaggccacttcatgttgcgagagggtactcgattagagcttgagcgatatgatattgcagaagtcaaatggagcgctaagcataatttcaattactacagtacctctacgacttgaacacaaacgacaagctgattacatgggtggatgaggcatgctcctcaagataattgacgtgattccctagcaggtcagggagagagacacgagcatcgctgttgctcatctctgttgcctctagtacgagctcattaaatcgtgcactgcggtaagcatgctcattggtctcgtttcgagttcacaggcaataaagaaagactatcggtctatcggaagaagcaaggctcccccggaatcgtgcttaccgatacgtttcatacccccgacatagacacaaacggagaaccgattttttcgaacggcagtagcaagtcagcggagatgtactcgtatgtcttgcagctggcgttgtcgtcgaatatcttatcttccaaaaatgatgcactgcggaagcgataacgaacgttacgagacccgtatgagacgatagccccctttgtcgagatgtgacgacattgagcgatcaaacggaacatgatcaacgtcggatcagcaatcagcggctcaccgagcgcattgtgtgatgcagtccctgtaaatagacgtggtgaagattctcttgtacttcaccagaacatactatgcacaagatatgttccagataccggtatttgaatattatcccaccgtttccttgtcgtatctagacgaggctggcgattgactaggcaaatgtccggaaaaagggatgagcgatccaaaaagaagctgcccgctctccggcggtggtgggggaagtctgcttcttgggatagaaccgaagaagctccgaaaacctcgcaatcatctactcttacatctgtgcctcaagaaccctcttccgaggaccctttcgttaattggtttaaggaatacgaatcgaaacctgggccaccgatcacgatctacggagatccaatcaggccttttacaacttcaagcgatgagttaggaggagccagataccaaagcacaggttcagaagaaactcgaagatcgacaacgactgggaccggaccatcgttcgatcgagatgacgcacgagatgacgcaacaacttgggttgaggaaccccttctacgtgacactcccaggagacatcccaaggaaccgaatacataggataccatgctccgattgtatccatcatacagtatcagagcaatcggcttgcgatacgaaccacgaagaggtacccgaaaatcaatcagtcgtctttttgttggcgtagacatggaaatgtgcataatatatggatcctgcaggatatagaaagaatcgctggctggcaagtggtatcgaacgttcactttctcaatgcgccaactttgccggttctagatatgactgttacagttccacgtataccagcttgttttcctgccacctggccaagccgtcgtttcgtttgacgagcgtgcgtgccgtcgacctcaggttcgccgcttagacgtactagtacgcttgtgtagagtacagacgatttcacggggagttcggctccttctccgctcacatacctggtacagagatcggcatgtgcatagtgctctgaaaggaagtcgcgtttcaagtcgatcatatgcgatctgccatcgcgtgactgcctgcacctggctcacagaaggggggcgggcgggcatactagagtacatgtgatggaggttctccataatggctatgtcaagtcttgcgagacagcagatacgaaaggcattttttcatactttcaatactacgaatgagataagcaggtcatgaaccttgttctgaaatcgtccttgtctatatgctcgtctctccgtcaatcgttttactcaacacaccggtatctcgggcgtttccgtcaggcgcacgtggcttacgacgatttcacgctcgcctcatcgggattcaaatggatcgcctcaataggagcgatcgccggagaagatccagccggcaggactcgtgaggatcatataattggatcgcttcttgccgaatatctgcaagcggcagctatagcagttcgagaaacgaatccacagcagcatctggatcatttaggacccgtttcgaccttactgaaccgcgacgtccatacagaactggtggcaacgatgagtatgaccgggaaatcgcacaactttccgcttgccagtcggacgcaactgagggttcgaagcctcacacaatcattcagctgtgtagaccaaaataggatatctcatctacctagcagaacgagatggtctaatgggaccgaccgaacgagacctacatctggacttgccgattccagggagaatattaagattccggcggataactttctcaggtggtgcagattaagagagcgggatggtctcaggccaaaattccagacgaatgtatgcaatcaggtcatcaagattggttggagtcccagtctgcatcgactgccggcaagcagaacgagaccagccggtcaacgacgtacccttctcctacactcaggtcccttcatcaaccttcactgagtcccccaatcgacaatcaaacaatagagatggagctgaagttcacagttacggtggctccaatccatctatcgcttcaattgggagtccgatgacgctcctcccgctctctgccatcggatcggaaagtccgaacacagagggctcaatccctgcgaaattacattctactaattccagcccaaaccataatcgaaggatgctgatgataggagcaacacaagagcacaaccctgatcatcaatataacgtcgagcatgccactgataacgtcagcacaggactactcccgactctcagtcccgcgtttacgaaaccatcgacgagcgaaaatttatgatggagcggtgattactggtcatcacgacggttcgtctgttggagaaagtgtcatcgaatatctccctgcgatcgaagagaaaacacgtccatcagcagtcccaatgcagcaaagtctcgagaccgaaagatggcccttatcggtcataattcaattactgttcggccagctatcggcattcagacgggcgctcctagccgcctcatcttacgccaaactaatgattgcaacaaccaccatgactatgagacaattcgaacaaaggttcttcctgtataagaaacgtatatccttaaatcgtgtggtcccgcttgatttctatccagcagtacatagtacaagacatgactgttaagcatatctgtagccaagcttgaatcttcggtgataacctggtcttccggctagattcacttcttatcatcatcgcgcctcgtccccatctgctactttgatggtatggcttccccggtactgcttcttttgaaccttccattcctctcgtgaaagattcaagcaggattttgatgcccggaatatggaagacctattccaaccaaacgtacatatacctttagcatatcccgctcgccaagacatacgagtagcagtgttatcgcgagcctgacgcaagagtctttcggcagggattttaatgacaagagcacgtgctgaagcgtgatcaaggggcacaaaggaatgtcactcacacggccgcgttttgagcaaccgatcgagcaccgccgcctgaaccgatataaatggcgggatgtatgatcagtcgccgctcttcgtttataagagcgtctgtcctgtcatgggttttatctcccgtctacatctcaaggtcgggggcgcaactgatacatagctatgacaggtcaaaacaggcacagatcaaacatcgagcaagatccttctatgcagtcaagtctcactaaaatagccctcagcgatttccagagcgtggaaagctctaccggggggtgtagtgtgcggaccggttcctcaattaccgagctccctccatcgattagcaacagtggattagagactcctcagaaacagatggaagtgcctttcatgttagatttgacaacgaagcgaccggaattcttttcaggagacaaagtgagtcttgtgtcgacgccttgcgaccgttgcgcggactcgggggttcggaagtctgatcatggctggtgttgtcccgtgctcttttgtgaaagcttggtatgctcggtaatagtaatcgggctcaaaggcagacggcaggagcaggcgatggagaggatagcactcctgtcactgacattgaggacgagatgcaagaagacaagcccagagacaagagagtagaacgcgatagacgtaaagcaggggattggtctccgcaaatctctcctcctcaaccagacgatgaaatggcagggagcagcaagtttgatatcaaagaacgggtaaataaataggaagaacgcccatgagcatgctgcaatgaacgcctggaattgctcgagcctgctgtagtccaaatcgcctccccatgaatttcttaggcgaagccgatcataccttgtcgtatttcgtgaatcgcagcttctacactttgtcatcagcaacacgtatcatgatttcgtaatctgcactgattcacgccaccaagtcgctgagtgtagaaatctcgatcaattcgatcgatggacggtcacgtgttgcgggcggatcttgaaacgccgtcaaaggaaccccgcgtttcatgctcatcggggttcgagcgacaaggagctccccgaacaaaccacacacagcggtacatacggtccaaggcagatcatgaggcgaggaagaatcgattaggctgagtctgctcgaaggtggtttttcaaaatcagtcgattaagaagctgctttgactattgatcctatatacatgcacggcaagatgaatgtagatgctaacgaacctttgacgccactgacgagattttggggaactgaccttatcgtcagaaagagagaagcgaataaagtggctgtaatctggtggccaaaaatgtctgcatcctcgagccctacagtcagtcgcaaaccatcgagattagccgaagttgtcaacattgaagatctatccgactacgagtcacacagatccgattgcacccagcccgagactgtgcagaatgagggtacgaccacaccttcgagctcacttcgacggaggacgaagagcctgacacgactgagaagagcagccatgaacatcgtcaccgggaactggggaaagtcaccagctgatcatgaggaagacgggattgaagtgacgggcagtcctagtttcgaagtaacggcttctagactgtcgagcgattctaccagtccgttttccaattttaacgattcctccatcggcacatcccccatcagcggaccgaccagtcctactgtcacccgtcttagccctcggcggaagacgagctatgccagctcaatagtatcttctatagggacgaggagccccgaccaaagtcgcactctcagggggaagagctcgatctcttccttgaatgactctttcaagcgtgacaggcgtgatcagcgtggcaagcttgacaagcttgacaaggacgttcctgatgataccagggggatggaatggcattgcagaggcactgggccgttcccggacgtttcggacgacgagccagactctcctctacttacgaaacaggtgagacctcagtcaaagcgctcgatgacggatccccgatttccagagttcggagcggtcccatctatcccgctctcattgtccccggtgctgtcgtcgtcgtcgatggagatggtcggtcttcggcccgtcagccaatccgcagacgagggaggacaaggcggaccatcgttattctacgagaagggccgggtcatgacacctccaacatccggctatctagaccgaccgatcctaccaaaagcgttcaagaattcgtcgccggctgaacaacatcatcggtcagcgcgatgataggtcgctcagccaaccggatttcgcccggctccctttgtatttgatttgatgacaaattccacgcctagcaaattcatacctggtcgtgaccggcatgaggtcatcgacgtcttcatgtattgatagcgatttccgatgacatcggctgatctttgccacagatgcgggcagaggtcgttgatcgttgtttgattggtcgtgtcgagccggacccgagggttccaacaggtttcgaccttggcacgcggcatggaccgagcgacaaggttcggcatgaccgactcgcgtgggaccaaagtgaggtggggcccgggcagagcaggactagagtggcatcagcgccggaaggaagattctcggagttcttttcttgtggggaaccgagctggtcctgctgctgctgccgcgccttacctctccctttgatggccgaggttgatctacggccaatccatcatcgtcgccgggttgttagttgtttggttgatcagatgacctcgttcacgctgctatttcctgacaatcacggtgccacacatctgttatctctacaaagacctcgtgaggttcgactcggcagccaagatcattgcagcatcaagccttaggagagctcgtcatcgtccgtcggccagtcgattaccggcaccggcaagttgacctcggaggatctaatctcacgctcgacctttgctctcgcagatcactggatcgaggattgtcgaacgtgcttgagcacagccgtctgcgttgcctgattgttcggcagcagtaaagagaggatatcaagtgatcaaatcggtagatcgtttggtcgtaccggttatcatctttggtgcatctcggccgactattgaacctggctccacggactcgaaagaggatataggctcttcacgatcgaggcgattcatcgcgatcggggtggcgaccttcttcggacatccattcatacaacctaccgcacacacacgcacacacacatacacacaacccccttgattcaacgccaccatgacgttcatgtctaccccgcctacgagttcgggctcttcacccccgcctccggcttaccatatcaactcggaaccacccgcctatacgaccgttctctcccgcaccctcagtcgtccataccatgtcgcctccacctccccgcagctctccagtgggactgactccactacccctcagatcaaacgccgctcgtccatcgcctcgacgttcaagaagtcttccaccccggctggacccgatctcgacctcgaacccgtcgtcgaccccaagacgctcttacccccgactttccgggtggggaccaagtacacgagaccggtcgtcgatatccaggggatgaaggatcatctcgtcttactggcagccatcgagaagaacatgcacagtgtgatcaagtccgcactggaggggacttacggggatgcatcccataacgtgggcaccagcgatgagaaggccggtttccgccctaatggggatatcaagcaagagaagctcgaactggaaggagaaccacaatctcaacctatattgacaccagacgtcgcctggatggcgtacgccaccaagtccgaacgagcctttcaagaatggatccaatccgacatcgtacagaatacgcagagtaagaaggaatggacgggcgaacagttgcctagggatttgggagttatcatgatctggcacgcgtattgcttgaatccgagatgtgagttgcgaggatcgagcgccaggtcgacgggattgcaggtacgggggttctgatggtctaattgatgggattggcaacgagtagggtattatgaagacaccatgggacgggaaaagttggtcgttttgaacaagacgggcgagtttcctttgcaacgtatcgtaagcctatctatccgctctcagtctgtggagacgacccaagtctgattggaaactcgacaggtcaaacacatcgacccggacacgcttgaataccgtccccgggagcaccacgacccagttccgcctcccactgcggaagaattgttacagacggtcatcaacgtgacttgcccctggtgctcgatcgatacgcccgtgaggctcatcacagacccggaaagtcaggacgggttcagccagaaacacttttcggcaacgtgcgctctctcgggctgtggcctgcaactcgatcacgaggtcctcaaggtcggcaagttcttgaccgatctcagggatatcgtgacggggaaactcgagtacctccccggaatgcgcctccgacccagtgacggattggaggatggggagaggtccttgttgttctcgcaactcatcgccaagctcttcatcgacgaatttgataccgatatgaaactctaccccaagcgcaaagatgggaaaggtccgctgagacccgacaggaatgccgtcgtcacggactggagggcatacaacaagtacatccagccgtactacagggacgagctcttcatcgagaaccacctctacccgaggatgcctacggtcaagcagatcatgcaacgtcaacccgtcggaccgaacgatctggccagcccgaaccagatgcggtactaccacgataaggtcaacaaggctctcgaggacgggcgtttcaagacctggatcgcaggattcaggttgaaaggagacgaattgccacgacggctgggtaagatgtggagcgcctatcaaaccaatgggatcgccagcttgaacttggccgaggcgagcaagcgacagagcgggttcatcgccaagatgaaggatatgggatggctggaacggaacaggtttgaaggagaaggcaaggcgttcctattgcagaagagtgcagcgaggtatcgtgagtcggcttgacgtcgcggtacggttgccgctctgctgatgcgagcaatttatagacgctttcctggacttgatggcgacaagacccgctggctttctctgtccgacgctggacatcgatctggggtggcatacgcatcagctcaggaccaccaaatatcacgatcagaccatcgacttcataagccgattcgtcgatcacgacgacaaggtgtccgagagtcgtctgggtgacgcctacgcttacacggccaaagaatggttgagacgattcggcgtgccatactcggcatgtgggtgtcatcaaggagatggcctgatggacgtgttcaatccggccttcgcgctgcctggcaaactcaagttttggagcaagaacaaggagacgctcgaggaaaggaagaaacgactcgttctgcagatggacgttaacatgggagtggaagatagggaaagcacgcacccatcgacccacaacattgttcgggtgagttgctacgcccacaggaacaatagcggcatgatcgagctgacgaccctttccacgcgataggtcaaaggcatatcggccgaagattcggctcgagcgctccgcaaggctctcgacactgagcgcgatgcccacaagaataatacagagatcaaggatccggaaaaggccagactcgaggcggttttccggaagaagcgggcccatcgggatccattccttcacacctcggaatacgatcctatcatcagctcgtatgcggcgatcgaaaaggatcgacaccgatctcaagcaggggacgtcgctgggatgggccgtgccggatattggggagtcggccttggtgcgggagtcgtgattggcggcggggtcgtctggggaatgtcgtctccagattgtcacaacgaggaaggcgacaggttgagaggcaatgccggtaagctgcttttacgatgtcgaaatggatcggtcctagctgacccatgtttggcgaggactttaggagcctgcgctgttggtattggtcctaccgggggaggatattgtgggaccgggaatgccagtaagcgcagattgcgagatcgtgttcggccaatgtctgatgcgcattccgggtagattgtgctgcagcggcttgtgcgggaaccggcgccggagcagggtgttctgccagtgctggtgcttccggcgaccaccgagatctacaccgtctaattcgtcggcagcgtcagatgtgtataagggacaggatgggcgattgggtagcttgggtagacggtcgtggagtggaggccagacgacggcgacaacgacgcgggtccgagccgggtctttcgatgtgggtattgccctgactttaagcggtactgcagacggactcgctgtgcttggatttcgtaggtgcgtacgtgtttggttcgtcacgaacgaggcaggaggagcatgtacgatgtgatcgatgaaatgcatccaaggtcttgcgtgcatgacatgatcgtcctcgagcatgcggcggcatgagatgtacgtaaaaggtggattctcgggatcaaacgggatcaattcgggaagacaggaagaaaaacaaccggcagatacggccgggcactgggcgcgcagcagggtgatcgaagacatcgtcgcgagctaggccgaacgaatttattgcgcaggcggattgattcgtgatcgagatgctcgttctcgcgggcgcatgtcgatgtaatcatggatgactgttcgcgctgctcgctgctcgggtcgccagtcctcgagtgctttggattgcgaactcgcgtcgcgccgcatgggtgcatgccatgcatgggtgttgatacacgttgccgttgcgttcgcgcgacacccctttctaatgatggagatgtatgatcatcccaatctaggatcttgtgaccttgctgtagtctcgtgatagccatcgtagaggtaaggtcagatggttggacgaagagagtggcggaacatggcaagtttggcgctgggatcgctcgttcacgtcgaggtcgacagtgcttgcccccccggtcatgagcagtttcacaaggaagttaaaaacacggacttgacgcgatgttggatggaaagaggggacctgatgagcggacgagtatgcattggggcgcccttgtcaagccgtgccaacggagatggtcgttggactgcattgtaaacagtgaccgtgcgagttgcggtgccggtcgcagccggtcgatcgaggcgggcgcgtgttagccgcagcgagtttgagagtgacaacgggatgatttgcgtctaaacaggaaagctggcgatcaattagattctgactcggcggatgtcctagataaaagccggtcagtctggagggagggcttttgcgattgagctcgatgtacacgggatccgatggcgatgaaaggtgagacgcggaagcaagggactgtttgaaatgcgcatgcgtggtcgagtctcgtgcataaggcaggtgacttgggagccgggccacaaggtcaattcgttcggcacggtcatcaaagcgatgtatagagtaggccttcgggaataagcgcgagggatatggcgaaaagagaaaaactttgttaagatcgacaaaaaaattaagcccgcctggggctcgaacccagaatctcgacctcttattcaattgaagtaggaaagtcacgccttaccattgggccaacgggccccacttttgacggccacacccaccatcaaagatgacaacgacaccattcactctcagaccaggccaatcccaaatctgcgcggctgcgccacatccgcgatattaatgtcgtcgtcgggattcatcttcgttctgcagccgagaatcgtaccgtcgtagatatcggagacgaacccggtctgcttcccaggtctcatcaatcttcaccgcatccaagggttaataaccccacaaaaggcggaaaggcgcgcgcagatcgtccggtgcatccgacggcgatcttgttgtgcttccgaaagcgctgagaaggtcaggattacctcgtcttgccagcggccagagaagcatatatcagcgtcatttgccctcgatgaacatacctattacgagtcgtacgcgatgatgcgacctgaacgaattcgacaccagagcgactcgacttgcacccctccatcccgcagcttcgtaccatatggcagaatatttcacgctcccagggagtttcccgcataacctagcctctgatcgggacgaggtttcacccagcaaggcattccgacctcggcctcgattaaagcgtactacgcaaagtatcttgtccgggaaacactgggatccccttcgaagcgaggtgaggttggcatcgactggtcgaagatctgggaactctgactcgtcactactgcgccaggccaagccatcgagacgtcggttgctgaagagtctcagcgactggctcgacgaagtcgaccctccgaccgttagcccgacccgctcttgcgactcggtttctccaacaactactgtcaaccccgacaagttgctcgaaccggatgatgacaccatccctgtaatttgtgacagggacaaggacgacacccctcaacgagattggccgactgccggtctcatgaacatgcacctagacctaccgagggcggcacctagcaagccgatccttgtccctcccgagtcaacttcaagcagacctccgattagcccacctcgtgaagacccccaagaacacgtcatcgacctgacggtcccaacatcacccacgccaacgaccgatttcgaacgacgtctcgcgctcaggcgaggttacaggtgggtggtaccgataccaatcgacggcacgcgagtatgggatgagatgagataagatgagatggagagcagagcacgtcttcgggggaggacgggagctgatgctgtggtcttgctgtgggacatcgacagggggcgtataaccggatgctactcttcaaggtctcacccggaagccctacgggggttcgacgggcctgggtagggtggtgttatggggttcgcctttccaggaggatgacccaggcagtaatacgatgcgcataaagcatctgggcttgcacaggatcaagggtagagacacgtcgacctattacgagcttgactgtgtataagttatttactgaacacgtatgaatggaacgcagtgatccttttcgtcgtggcgatgcagcagtatgcctgtacgtcgagcttcctggtaacggttgccacgtacgggaagacagagtgtcaagagctgatgcccgagcataccgcattgcgtcgccaggcggcctgatctactccatcctgaagctggataatcaacgagcagcacgaacctccctctccctgctcccccctcctttgattcgctcgacgttccgatcagagcgggctccatgatcaaattcgcccccttcctttctttcttttcgcgccaatgacacccggtgatcctaccatcctttgttcccggagcgcgcacacgcgcgcgcgagtttcaggattgtcggtcgatcgacacaaagaagccaaaggatacatacccttgagaggagggcaacattgaacacgacattatcgaatggatcctcggaggagccaagtgaatgaacgtctagaaagcggagcacacgtttgctgaacttggtcagatgacacttcggggacccaaatcttcgaccccggttcgcgggacgatgcaactacgacgaattgccgcgtgcgaatgataccttgtcgcgaacaagatggagatatataaatgccggtgagaacggtgttctccatgagaccccgacgtcgagctcgacctcccgcacccgacatcgcattcacatacagctagcacggcatagttccgtcgaatccctacagctccgcaacacgccgacgccgacgacgatcgacgctcaggtgattcgttaccgatcagtccaagccaaactcagggaatcgatcgatcaggtcagccgatcgtctttaccccggcctgaaatcgttcgccatgcccgcgtctgaagcttatatacgggtgtcgtttccagatcaccctgcccctcgtccgcatcaccgccactgcctttaaagagcacccgcccatcataccttacttcgccccccgaacccagctacatgctacgaacaagcccttgaggtactcgacaccgacaagaccgcggaccaaactcccgccttcccccgctctctctcctaaactcggtccgatctcctgtccgtacggcggcagtaacaacaacaacacctctggtctttacgagccaagtcgaaacacccactcgatggacgcttgtgcccccctcgcggacctacatgcagcggctgtatacgtatcggagcgactcaaggcgtacgtaagcgaagaagacgggtacatccacggggtaggtatcccgcacgcgttcgctgggagctgggaggtcagagcgttgagcgaggggttgggtggcgggataggtgaagggttcgaggcaagtcgacttcatctccaggggtggcgcgtgagactcatccggtcgcgccccggatcgcaggagatcatctgcctcacgcccgcatcgaacagacacctccgacaagcgtttcatgcgcagccacaccattgcctctccccgaccagccctgcttccacctcctctaccgaacacctcgccctcgcttcccccgtcgactcgacctacttttccgctccccatcttcaacactctcccgggtccttcaacctcggctatggatacgccgggaacggatactcgaccagcaactcggacgaagagggcaagagtgtggaactgcactgtcaccccaagagtggagtaccgatgaccgtcatcgtcgacctgggcgacgagcgcgtctcggggaaaaagatccggatcgacatgttacaggcaggagagtaggtgtacgctcgactttttgcgtgcgagcgatgacgattgacgctcggtcgtgtctgctcaggtacggtcctcgaaagctttacgctccgacctctgcgggcaacgccccgctatgggagatcatggacttgcccttcctctcgccgaccgagtttgtccgagccaaactccggtgtaatcgagagtactgggatctcggggatatctcatggatggtgagttcccccgtcaaaccccactcgccggttgatcgggagcgctgacctttatcgacgttttcgaccatcgcgcagatgatcaattattcggaccacctcgacctgaacaggttgtcgattgaagaggtcgaagattttgtccaagcgcagcaagacgaacagacgagtcaagtctgggcgagtctcaagcagacgtggggcgtctagatctggttgcgtcgcctgtatgacctttgtagcggtactatatctgcctgtaacctccctgtaaccccccgacgacagcttcgttacggacatcgtgccctggaccgtcgtgtgaggagcagaagatatggattcgatacatggtcagactcggtccctatgggatctcgtgttatctacagtgaatgatgccacctcttgtcttccgtaattccgcttgctacactggttgatgctgcgatccttcgagacttcatgatgttgatacagtaggagaaagattgaaggagaaagattggatgcgagtccgtgaggaaaagatatccagacagaaagaaaaggaaaagaagggacggaaatcgtcgcctgtccagacggatggcgagggcctagacccttttgatgacccggtcattgttggcttccgcttgtgcttgcgcgacagctcggccaaacgtcgccgaaaatgggtccttcatgcccaccttgacgggctccgcctggacgcccagaattcgctgagcctcttgcatggacacgcgtcgaagcgagccattcaatgtgggatcgggcgactcccatggcacgtacatcagttcggagggtgccgattgtgtgccaaggtcttcgcgcttttccccgcctggcgactgacgcgcagctctaatggtcgtctcagagtctgctcggatcagcatcgacgcagacgacgaacgtcgatcttgaggtgatccgcggctcggatgactgcccgtactcccaggggtttgaatgtaagggccatgtatccagacgtccgaagtcgcgcttggacggatgcgcgggcggagcgcgatggctgccaccggatcccgaacatagttggattcgtcgttgctcagcctctcgatgatttcgttcagtcgaagaggacgaagtggcgagtgcgggtacagtccgtctgtttgacgtgaacgtgtggcgggttaggatcggtatactctagatcggacagaccaccacacttacctcgagcacaaattgggccaagacattttgcaaccatgatccgcacgtccaagaggtcgtctgacaagaccgcaaggtcgtcgagaaagtgcttctcaaacaaggcaacatctgccttttgctggacaaaggcttggatgcaagcaatgtagctatggacggcgagattcggcgtgtcaatttgcatactcgcgcctatgctctttccgtgtcccagccccactcacgttcgcctctgcttgaaattgccgctgactgcaagatcctgcatcaaacccaacaccgacgtctgcgaagcctcgtcaccttgaacagcttcgtaacaagccggcatctgtatccggacaacagcagcataagcaccaacagcgacatgtcgcaaaccgacccaagactcacgttggcaatggtggcctcgcgaatcgcgtgaaaggtatcgaacaggccgagccgcacgaggtccaagacgggttgagtcgtctgctgcgaagccatgtgacggaggagcgctgcaaagtggctggccaaactctctcgatgatgccagttgggtagcgacccgccttcccacatcgcagagagctcattgagcaaggccacactctgtgcgagcggcaagttgctgacaaaagtggggaggccggccaaaaccttggtcttgccgtcatcgctgccggcaatgtactcgtcaaaggacgacaagaggttttcggccgtgatttcaggtcctagaatcttggccaattcgtgcatcgatgccgagagactcgctacgatgcggggatggttgatattgcacaaagctcgataagttggtcgcaactcgtgccatctctccggacccagggcaagacaaacggcgggaagctggcgatgcggtgcgtcaagtcagcttcgaagtatcatcacatgcgagccgagtctacgcacgttgaaagcggaaacaatggcccggtcgaggttgtcaaactcccgcacgggctctccctcggtggcggtttgcgacagaggcgcctgggaatagaacacctccaggagctctgcgggcggaccctccggatcctcttgaaagatatggatgatctctccgataatctccagcaaggtgtactcgaccaggtctcccgagacgaggagcgcttcgaaagctctgaccgtgtacgaacggcggtcatcaaagctttcgatccgcttgctcagggccgggaggcagaggcatgccgattgtctaacggattccgtttcgtcttctacgaaatgttcaaagatggacaactgcggcgaaacaaggaaaaggggtgagcaagataaaggttcgcgacgaccgcggcaactagactgaccatcagctcgaggttgtcttgcggtgccagtttcgccagataagccaaggccagagcggcttcggccttgacgcccggttcatcgtcgagggtcctcgcgacttctctgacgagatcgtaccgagtgatctcgtgcggatgcaagaattcactgatcgacgcgatcaagttcatagagatggcgcgtccgaggatagcttcctgtgccagctgttgcttcaaataggcgtcctcggcctcggcaggatcgagctcttccaatgcgacaccagcatcgtcttgaatcttgtgaggtacctgaacatcgctgccgtggctgtccttgcgagacgtatcgtttcgatcaccgtccagtcgcccaataccaaagacgatgccttcgagcagttccttttgtaccatgcgtctggctgcgactgaaaagatcggaaactcgtgcgagtgcgaccctgtctgagccatataagatagcctgacttcttccggtctctcctctgtccactcgtcgagcacgggatttgatgccttgcgcaacttggcgagaatggcgacaacggccgcgcgcgctggatctgcgacgagagagttctggctgagcaagagggacccgatcaacggcgtgaacgaatggaccgcaatgacgggtctttcgacgaccggtccatgatccgtttcggccctcttgtcggcgaaaggatccgtaaacaatgccttttctcgagcagctgaagcgtgtaccgaatcgctggtagccgtggtcgcaacagacgacggggtccccgcagaagagggggtcaggaccgtttgcattgcgctcgagacggtcgaagcttttcgtgaatcttgcgacgtgccccaagatgaaccttcactggacagattggcagagccgctggaacccgagcctggtgtgcttcggaaggcactcgggtctgccggatggtcagtcgccgtgtgagaacgccggaccgctcgcacccctttcgacgtgaccgtaaagacggggtccgtcgtgggatcttcactcgcagcgatctcgtcttcctctccaacaagatcacatgcctgtcgttgcatggtcgccgggtcagtcgcgcattctcgcaccaaagctagtcacgcaaaagacttgccgtgaaaaagtaccagaggatcttgtgtagctgcgaggcaaacgcctccttgacagactcgtctatcatgggagggaagaatcgcttaattccgcaacggccaagtgatgatccgcaccaaactcaccttcgtccaatgcgagacccgtcaacagggggatgacgtattccacggcttcacaagggtcggtgtcctccaggagatcgcccaaggtacgcgcgatatatgccctgtataaaacgatcgttatgagcaaaagcgtagtcgaacgatgtcgagcggacactaacctgtggaaagcatgctcgctcttggacaacaagaatatccgctccaacgtcaacaatccctcgtcttcaaaggctacgtcggcgggcaaggtatcggtgggcgcggccatgacctcgtccgtgtcattgccgacaggcgcctctggcagaggcgtatcgagaacagccgagtctccatctgcgttttcgtcgtcggcgaatgcagcgtgcggggagctctcctctgagaaatatccttcttcttgcgatggctcgtgctcgttgccgagctcgtgttcggccgacaacggagtctcagggccaggttcgacgttcaaagtcgaggtagcgggttctggtggcggaatgatcgactcgggtgacgactcggttcccgagggcaaagcttgtgggtcgggagtcgactcggccgcgagactcgtcatgggttcgaccctttcggtttctacgatcgcctcttgtcggggagaagtaggttgcgcgacgaatgccgggctagaaggagccgatcccaaggtctggaccctggaacccgaattccgtgatgccaagaccggcctagtcaattgagacgacgatccgctaaacgatcgagtgcggtacgtcagagccggtaacaagggcggagagggtgagcttatgtgagagatggctcgacggaagggaggcgggacgggtcgacccaacgccggaggtaaagccggaccggccctgtagtcggggaatgcggtactcgatgctgggggagatgcgctcggtgccagcttgggagaggttattgccggcggcaaggccaagggaggagacccgccgagcgtgtgcggctcgtcgtctgtcaaaacgggcacctcgtcgtctcttgtacccggcgtaatgggtgcgcccgaaggtggtgtgggttgggtaaagacaaaattgggcggattcatgtcttcgaaatatcgattcatcacggtaggaatctggcgtggcgatccaggaccgcgtggtgcggaaaacgcgggcagatcttgcgcattaaagggagattctcctcgatcgctaccgacgctcgcgttggacctgatggatccggtcggtttcttggcgtgccgatatgaaggcaacgaacgggcgggtgatttcatcgacgccatcggactgcccggcggcgagctgggtgatcccgatttcggcgggacgaacccgctcggaggtctcccgaacagcgccgcgtttgaatctcgtcgaccttgaccgatatacttgcccgcctcggcgctgtgctgcggcgtgcccggggtggtcacagggaccgaggccgacattgatctgctgtgcatcgccaaggggggtacgagcggtgtcaaagccggactagccatcccggcatacgacactggcaaggcggtgacgggatcgatggcctttttgctcagatccggccagacgctgtcccacatgtgtacatgcccgatcgaaccgtccgaggtctgtgacctgacctggtcttgattttcgtggctgagcgaccgatgcagcgtgggtatcgtcggcgacgagacgtgacctcgagatggggaagcctgccgcacctctctggccgtactccatcgtccgacatctcccgtcctgctgcccgatcgcctgtgggacgacgacgacgagctcgacccgacgatcccgacatcggtcaaccattcctcctgacctgcttcgttcggtccgggtgatgaaggtgaataccgtatgggtgagaggacggtaggttccacgcccaacaaggttgacggcgcgacgactcctccggtggggacgagcgtgtccagcgaagaactcggcggtcccggtttccacgtcgtcgacgaggatggcgaggatgagctctttctctgctgttgatacctgatcgggctgactccggaacgtccatcgtccgaggaagatctcctcaactgtccttgtggcgaagatggcaaccccgagatcctatgcgccgccggtgacgctgccgaaatggatggcgagcctgcccaactgtccgacgagccttgtgagctgaaactgtccctcccctcggcctccctgtccaacttgttgctactattcgccctcccgtcattcaacacctgcctggccaaattcaactggtccgacgcttccctcctctccgccgtcaggtccgattcgtgagggggcgaagtctgagctaaagtcgggctcgacctcgtacccacggcgccgagggattcctggacgtgaacgatcgggctcgacccggtcctgaccatcctcggacttcctccgctgaagcgtcgaccgggaggaagaccggtgatcgaggagacggacgaacgcggggacgaagctgtcgacctcgtcgtggtccccgtatgcgagacccggtgagccgtcgtcggtacagaggatgaagctgaagccgaagccgaaactggagctgaagacccctggccgatcaacatgggcggtgttccctgtccacctggtacgggcctccctgaccctgaccctgtccctgtccccgtgccctcctcgccgcctgacatggaacccgaacccgtccgcgaaaacgccggggattcttgtcccgaagacgcgcccctcgagatgtctgacgtcgatccgctcgtatagggtggcaacgtccagctgaacgctccggccagttcgttgggttcgcctggaccaaagggggagaacttggtcaccggcgagggaggtgataggggatgattcgccgggggtgggttgtaccccaagggaggagccgggggtgtatgttgcgagacggagacgctcgatcgttgagaagatgatggagacgctcgtctcgaggctgtcaccggggtcgagcaagaatacgcaaacgaaccgtcagcggtgccgtcgccatgtcgaccgcaaaagacttacccccagcatccaacttgaaccccgtcgatccctctccctgacccccgaccgcagccgccgacgacgacgacgacaacggggtatcatccagcctgaaccccgaacttgacggaggagagatcgctctcgcgatccctgctcccgctgcccgtccccgcgctgtccccccaccgaggctggtcgtgggcgatgtcgtcgtcgatggcgtcgataccgcgttcgatgctaacgttggtaccggatgctcgaccacatcctccaccccggtttccttgggtcgtttcgacgatgtcggggtcggggtcggggacatgattccgagatcaatccttctctcttctctccttcagctcgactcgattcgattcgatggttatattatctagatcgtatcctcctggtcgatctctcgcggtcccgaggaagatgtacgggtgtgtcgtgccgaatcgaatcggatggaatgggatggtactaccgagtcgtacggcctcgatcgcaaaggtacgacttgggggttacggatggaaggatgactgggggtgtgtagacctagaaggacgacccgggtcgcatcctcgaagctgagggtagagggatatcttgttcccggtgtggagatgggaatggggagagagtggtaagagtgcggtgtggtgtagtgtagttaaaggtgttgatgacgcgctctggcctgacaccctgaccttgaccctgacccggcgacctaggtccgcttgactccctctcggtacggccagactagacaaggaggatccccgggggatgaatcgtcccgcccgctaagtattggggaaaagttacaggtatcgatctcctcgacgtcgacgttggatctgggagagatgccgagttgcgattgtcgatgaggggtcgcggtttttgggtccctcagttgatgacgacgacgacggcgacgatgacgacttgcaggtgacgaaacagagaaagagagagagatagaggcttgcacctgtctttggtagaagtcggattgcaaagatgttcgttggggatgacactctgacagagagtgtacttggctgacgatgtcgttatgcgacgaaagaggacggtcgaggcggaggaggaggaggatctcgccagagacagtgagaggggggagagagagggagagacgcgggagaggacgtggggatcgcctacgaacggtaccaacatgtcgttcgcatctgccctgcatacccctggtggaccccgacctgctcgtcgacgggatccagaagtcgacgacgagatggcgcgtgcgtggttgcaattcgaagagagcgccgcagcgtcccgtgcgatccaggcggtcgaagggcacagtcttgggccaggcgagggtgcgggggacaatggtacgggaggagctggtggttcaggaggtagacagggtggtaagaagggtaggaagaaggtcgttttgaccatggggttatcgggaggaggaaggtcgaggtgaaaggcaaggtcgaaatcgcgcgcaccaggtactctaggtccgaatcgatcgatttgcatgtaacgacacgatgttcgagagtcttgtgtgacgatgagcatggaacgacaagacatgaacaggcgctcatcacatacgctacagctacatggtcatcataatcctcctagatgtgtcgtaagacattgacgagtcggtagcaattcccatcacaacatgattccattcgagcttatccgcgttcggcgattcgacggatttccgcggaaacactttcgggggagttgagattgggggtggggagtggatgtcatccagcatatagatggatgcatgtattcaactacttccttcatctttgtagaccagccactaacactctcacaaactaccaaaaatacccacatccacccacacacatccaccatgtccctctcgagcaagctcaccatcaccgacgtctccctcaagggagaaaaggtcctcatccgagtcgactttaacgttccccaggacaagaagaccaacgaaatcaccaaccctgccgtcagtacgagtgtcccatagatacatatgttgccttactgaccctatgcatgcatactcatcatgttgattgacgtccacagcgaatcgtcgccgctctgcctaccatcaagtatgccatcgagcaaggcaagtttcgcgtcctcattcccgcacgtttgtgctgtcacaaacgaccttttggcttacctttttccaccataaacacgaccttgactaccaggtgccgcctcgatcgtcctgatgtcccacttgggccgacccgacggccacaaggtcgaaaagtacagcctcaagcctgtcgtacgtgcacaccgtccccgatcatcgactgggtgacgtgggggcactcctcgctcacgcccacttgaccctcgctctgcaggccgacaagctctccgagctgctcagcaagcccgtcactttcctcccggactgtgtcggttccgagaccgaggaggccgtcaagaacagcaaggacggcgagatcttcctcctcgagaacctccgattccacgccgaggaggagggtagctccaaggatagcgagggtaaaaaggtcaagggtgagtagcggcaacgacaacaacgacgacgacgacgacccctgctgctgacacgtcgaaccttcttctcgccgcctcggatagccgacaagtccgccgtcgatgccttccgcaagtcgctcacctcgctcggatcgatctacatcaacgacgcctttggtaccgctcaccgagctcactcgtccatggtcggcgtccagcttcccaagcgagccgccgggttcttgatgaagaaggagctcgagtttttcgccaaggcgctcgaatcccccgagaggcccttcttggccatcctcggtggagccaaggttcaggacaagattcagctcatcgaccacatgttggaccaggttcgttcacgcttggggggttgctgcgtcgttcccgtcgagtgcgccgggactgaccatcgtcttcccctggttgactcgcaggtcaactcgctcatcatctgcggaggcatggcattcaccttcaagaagattgtcgatggcgtcgagatcggcaagtcgctctttgacgaggccggtgccgaaaaggtcaaggacttggtcgccaaggccaagaagaacaatgtcgagctcgtcttgtgagtcgggtcgcagagcaacaaggcctgggtgtgcagggatgctgattctgtcatccacgtcgtgtacttatccatcagccccgtcggtgagtccacaaagcgtccagcgttctctcgacacgacgagctctatactgacacgacgcctgacctcacatcccagactacatcaccgccaaggacttttccaacgacaccgagcgtggtaccgccaccgatgccgagggtatcaaggccgactggcaaggtctcgactgtggtgaaaagtccaacaagcttttcagggagaccgtcttgaagtccaagaccattctctggaacggacccgccggtgtctttgagtgagtgtctggtaagcacctgaaaaaatggtgcacaggctgatgcgatcgctattcgctacaggttctccaactttgccggtggatcgctcgcccttttggacgccgccgtcgaggcccagaagaacggatcgaccgtcatcgttggtggaggtgacactggtgagtcgcggccgtccagcttgctgatgaccgagatctcgctcacacccgacccgcacggcagccactttggtcgcccagcaaaacgccgaggacaagctcgcccacgtctctaccggaggtggtgccaggtcagtacagggttgagcatcctccccttgtatagccccagatgctgatcgtacgcctcgtatccacagtttggagctcctcgagggaaagaacttgcccggtgtcgccgagctctccgagaagagcgcttgaactggttcgcagcaggcgacgagcaggttgtgaaacccatttcgctcggcacgcagcgttgtcgcaggcgagaagtagggacagtgaccaaaccaaaccaaaaaaacagatagactaggtttaggattataccgaatgacatggttttctatgtgatcactagaaccgagcggagaacgaaggaccggttcagggcggtgactctgagttcttcgggcctgtatttcgaaccactattatagcgtttcatatcgtccggggatcagcatccatctccatcgcgctgtcggcatcagcatcatagagcaggtccgtcaattcagccaggtccaatgcaagctccgtcaacggactggtggacctgtttttctttttttttcttgcgacgcaagctctgtcaacggcctggtggacctgacagagcttgcgtcggacctgacatctgggtgccagtaatctagtcctctggtaaaagggatagttgtgaaacggagacggctatactcgcatctgctcgagtggtaaatgaccaaagtccctgtatagagctcgatgtgatgaatcgagtccaaggcgatatgatgaatcgagtccaaggagtttcccccccatggatgtggatacgtggattgccttgtgatcgactacaaacgctgacccctcgattgtcatcctactgaactgagtccaccagatcattcaatcgccttttgaagcccatgtcgatgaggatcaagagaaggctcacgatactgttttgccagaagatacaaaatcgacggtactctatctggcggtcgagtcgcagtgtcgctggcagggtgacattggcgagaccggtatcaccttcgagcgcatgtccatgtcactgaagatcttgccaagatcatcacgacaggaaaagcgtctgcgaaacaggttcaataatgcttcgaccggacgagtttgagatatgagcgcgaccgaaataacgtttaaaaggttttggaaagcgggcgaacagggttggaaagttggacttgacatcgattgacatgacattcagaattgcctcactcccacaaccatatcatattctccactcttggtctcgtatccacagagactttcctgttcaccatcataaactcggtcttcccccgtcacctcgtcgccagcatcctcggcaagatgcccaaagcacccaaagtccctcaattcccgctcaacgggctggtcgggatcgaaaaaccctcgggaccgacgtcgtgagtgcagggtctccaggtctctttcatgactatctgctgatccggcttatttgcgtgccttgacctccgtcacgccgaccagtatgagcatcatcgacagcatcaagccgctcctgtgtgaatccaaattcttcctccctcccaacacgaacaaccatacccgagccgatgccaaaaagatgatgaagcgtaaaggaggtcttaaagtcggtcaaggcggtacgctggatcccttggccgatggggtgttggtgctcggtatcggccggggtacgaaacacctgggccagtttctggaatgcaccaaggtgagagttctcgtcccggttgaccaggttggcggcgacctgtcgctgaaatcgtgatcgcgtctagtcgtacaccactgtcggactgcttggatcatgtacgacgtcattcgactcggagggagagatcatctcgacggcaccatacgtacacgtcacccgggagacgatcgagggcgtcctggacaagtttaggggaaacatctaccagatgccgccaatgtgagcaagaatccgtcgtgtacgctgagaccaaccacgccgacatttcgttcgtgctctccgacttgcagttactcggctttgaagatggacggcaagccgctctatgaatacgctcgagagaacaaacctctaccccgagccatcgatccccgtgcggtgaccgtgtccgagctcgtcttggaggaattcaccccggcccaggtcgtcgagggagatggcggtcacacgtacagtcctccggtcaagcacttgagcgaggaggaagtcgctacctatcgcaagttgaccgaattgaccaagacggcggggagcggtcaggtcgagggtctcatggacattcccgctgcggacgccgagagcaaggccgagcaggacgatgccgagcgacaagcctcgacgtcgactcacgtccgacctcccacgttcaaacttcggatgaccgtcagctcgggaacctatgtccggtccatcgtgcacgacattgggctcgccatcggatccgccgcgcacgtcgtcaagctcacccgaacccgtcaaggtcaattcacgctcgagccggaatcgaccgcgtcgacggtcgaagatgggttctttgtgtatgacgaggagggcccggacaggttcgactttggtcaacgcaagggcggtgtcatctcgtgggacgtcatggaccgtgccatcaagcaacgtaaagccgagatcgaagaggagcacgaaaacgagcagaggatcgctcagggcgaggtagatgaagaggaactgctggcgagcaagccggacaatggtaaatggaaaccgaaagagtgggagcgagagtttttcgccaggttcgtctcaaaggactgaatcgggccggcatagcgactgtgggcgtggtatgtatatacgtataatcatgacggccggatctacaacgatcagcgttcgcatctactgttgaccgggattctgctggccaccgccttcgccacctccagggttattttggggcggttgctgctgagcaggctgctggaacggcatcccgcccattcccatacccatacccatcattcgagccgcaaacgccgggttgaaagcgccttggttggctccttgctgatattgcccgccaaaagcctgctggccttgctgcatcgggttataaaagaatggcatctgaggcatgcccattccctgtccgggctgaccttgccaaccatattgcatccccatcatcgcctgctgctgtggctgttgcggctgttgcgtatgcatcatcgggttgacgtggccatagtgcgcttgctgagatggcattggtgccgacatgggctgtgcaatcccggtcccttgggacagcaccggcgcttgacccgtggctcgagcgatcgccatcgacgtgggtgacatgtcgcgaggtcgccccgagccgggcgaaccgaatccggcctgacctcgacctcgaccgcgaccgctaccttgaccgatctgtcgaccaccgtcctggttccttccagctccacctcgaccggagccgcgctcggctctgccacggcctcctgcactgccatctcctcgtcctcgacctcgttgctgctgtccatctcgctcaccaaatctcgacctggcctcgccagcgccagcaccaccgcggcctcgacctcgagtcgcacctccccttgctgctcctcggccactcgaaccggcaccctttggctgatctatcgagcccgaaggcacgatatcgtcgtatctcacggggcctgtccggccgcctcttgtgctcactgtcgacatgcctgccatcgagcgaccatcatcatcgtcacgcgcttcaggggcctgggcgtagtcgaggaattcgctgtcgtcatcgaaatcgacttcggctccggcatcccagtgccgttgcttgggagccgccgctctgaagatatcgacgaggacgatcagcgaccatgtttcaccaaagtgagcgacattccacgagtcgcctatactcacttgcccttgcctgccttgcgttgtctcttggcttccctctcggcctcgtcgtcgctccactcgcgctcgctctcgctgacttcttcgtcgtgcaaattactggcatccgtgcccttgtaccgcttgtccgtcttgagcatgcgaacggggacaaacgatcgattcccgctagccgggtagtagacgtgagtgccgacggtcagttccgaggcgccgggcaaggggtaaggcgctgggggtagacgcaagaggtagaatggttgtgatagcggtccgaaagtctcggcgacctgcaaccgggacgaatcgatcagctcgtgtcccactgaagacgcgcttctgtcgacgtcgcttaccacggccaagacgcgtcgattttcgagacaaatcagactaccctcttccaaccaaccttcgtcgtccccgatccgtagacctccaatcccagcctctcccaacggagccctgagcgccttgatgatgatcgtcccagagctcttggcgagctgcttttgttccctcttttcccgttgtttcgttttagcattcttcggtgcagggcgaggtttcacggtgggtttagtcgccgtggtggtgtcgttcgattcggaactgatcgtatcggcgtcgacggggacgggcttgatctcctgctgttcctgtatgatctcctcggtcttgggaaggacctctgacatgacctctaccttgaccttgacgtcgtcctcctgctccgtcttgacctcgaccggtctcgcgttcaacatgacgctcatgatctcgcctgcgaggaccagcctttccccctgtggcaacatgtcaacgtcgggtatgacggcgcgatcgtcctcgacctcgtgtttcgtcttgggtggttcgctgggtcccgccgcaccgccttcgtcctcggattcgtcctccatgtccatcaagttgatcggctctccatcctctgagctactagattcggaatccgacgcgtcttcgtctttgtcatcgtcgacatcatcgatgggctgtaccttcgcggtcttgccgacctcttcgtcgtcgtcgacactatcgctagcccagcccaatccaacgtcgaccgctacctcttcctccaactcgtcagaatccgcggtgatgtacccctctccatcctcgttcaacccttcgtcccccgcacccggtcgatcgtcgccgtaaaacgtcgtgagctgtgccatgagtctatccctcatctcggccgacatgggcgtattggtcgtcctccctgcaggtggaccacggatggatgacatggtcgatgaagactccgaatcagagtctgaatccgagtcgtccgaactatcttgttcgctacgaaaagtccccccacgaccggtcgatatacgaatcaagataccgggatgagcccggagtgcgatctcgatttcagatggattacggtgactcacgctccatcatcgctttccgatacgacctgcatctctgctcccgtctgttccatcgacaagccggccagttcgtgcccgttggtgaccatgttcatgatcatctctagatcttgcgggatgacggacggtgttgatccccctacctggctcgatgtggagcctgcgagcaaggagatactggtttgcggttccagggccatatcttgtcgttcagtcggctcggtgatggtatcctgattttcctgtttatcggtcggggccgtgactataccggtttgttcctgctcgacctgcatctcggtttgaggcacgctcggttggtcttggttcgacgcttgctcgatcggcgtttccatcccgggagtcgagacttgttcggtctcttgagacatggctgagctacgtcgtacgaatgtaggaccgagttgtaaccgggagttgatccagcataggtgtgtgtcgtcctgacgacgaagatggtgatatgataaagaagtgtgtgacctcttcgcacttggccgattgattcactctaaattcaaagtcatctctctcgaaatggaaatcacgtgatcgaaccacaaatcacaaaagtggggaaactcagaacgacccggatcatagtcagactttggtcacaagcacgcttgagatctaggacctagtgaggattaacatcgagagatgcagaccggcctggaatcgagtcgtggtcatagggaccatcatgacgcgcacgacgaaaacttgtttctgcctagctctgacgaaaccctccctcaccgatcgacgccgtgatacacgacagaatacgatctttcggacgagagcaagactgtacgatgatagatgagaatttcgagatatggtctgacaacatcgcaagatcagttcaatcgtatagcatcgaataatcgattctgaagagtgagggcgcgtagccttcgcgccggccctgattgtagtggattacgagaacttagaaaagatgtttaccgggcatgttcctctccgatctggccatctagggctgcggctgcgaatgacagcctggtgtcaggggggttactaccttttgtagaactgagaactgagagccattcacatagtccaagtccgtagttgggtccaaactcgacttctcggtgaattctcttctcgttgttcgcgtttccgcaggtttcatcatctccggtcgaagcgatcgccacgccccgtatgctcacccagcacccactttaccgatcaccgacgaccagactgaccaaggatgacgaccggatcgcgcacctgcgagaccgtaacgaggctgtgtacgacatgatgttccacatgatcccgagcttttggaagtcgcgattgttttttcgacggtccgtgagccgacctccgacctgtctccctcggacgcttccgatcctctctgtgccctgactgtagcgcgcgtctcgggctatttcgagcgatccttgatatttatttcttgatcatcccccgaagctatagcgatgacaaccacaccggcgacgtcgttcaacaacaaacgctgacctcggcatgaaacgtccttggaactgctgtaccagcagcacgtagagacggctcggcgtcacacagccggacccatgtatcgtagtcgacgcacggttctgtaccgaggagccgagccagaggcgggtcgcgatacaaaataatgtcaaaatacgtgctagcggttggcttgctatcttgctagtgtgaatgctatgcagatatacctgcaccggttttgaaagtcgacactgccatcacgaggtcgagctgcaagtcctctccgtgctagttttctgcatataacactcgacctggtcatcataagtctgtatagtcgcacggtataataccactcgacactctacatcgtctcgacaatcgaccgagacacccgtcttacctacctacctacacgcaaacgcgcactatattcccaccatggtccgatcgacctctacgctctttaacctctcgttcctcctcggttcctcccttttgacggggacgaccgcaagagcctctcacgttggccggggatgcaacggtgaccatatcgccaagcgcaacccctatctcttcccggaggacgatgcgcacttgttcaagcgacaagacgctcaggggtacgaccccaactctatggaccctgtcgctcagtgcacgggttactcttaccagcccgtactcgacaacaaggccaagtttcctcagatctgggagacggcagcgctcgtacctggagatcaggtcgctgccgatctgctggccagggccgaggctagcgtcgcagcgttggctcccaactgtcaagtcaaggggacactgaacggggatttctgtgagtcctcaacggggggttccagggagtggcgtcttgtggggttatgactaaaccatcaattccttcaccgaccccgacctatagccagcttcaccccgacgtatagtaacaccgacccagactgttggtggacctaccgtcagtgcgacaaaccctcgaacgaccagatccctgccgacgtcgtcgagctacccgagccttcggcttacgggatcgggttcgacgacggcccaaactgtagccacaatgcgttctaccagcacctcgctgaccgggaaatcaaggccaccatgtgaggcgtcgggtgcatcagacctggaggcgcgtcgcaggaaagctgaccgggatggtgttcgcgaaaggttctacatcggttcaaacgtcatgaactggcccaagcaggcgcagcgtgggctcagtgacggccatcaactcgccgtccacacgtggtctcatcagtgagtatcacctcgcacttatcgcgctgctgttagacgttgcgctgaccctcgcccttagatacctgacggccatgtccaacgagcaggtctttgccgagctctactacactcagcaagcgatcaagctcgtgacgggtgtgacgcccatccacttccgacctccctttggggacattgacaaccgagtccgagtgatcgccaagtcgctcaacctgacctcgatcttgtgggaaacggattccgacgactggaggatcaacacgggtacccccccagtgacctcggagcagatcgacgccaactatcaatcggtcctggacgccgccaagaacggatcctacgccacgagggggacgatcatgttgacgcacgagttgaacaatttcacaatgtccgaggcgatcaagtatttgcctgatcttcaaggagctttcaagcacgtcatcacggtcgcccagggtttgaacgtcacccatccgtatgtcgagcagaactatacgtgagtcaaacgaggagatataaaggtgcgggaaccgaccgagctgacgtcgtccgtgtctgatctggcgctctgtagttcccccgcctttgatgatgcagccgtggcctcttcatcgtccgcctcctcgtctgcggtatcatccacgggccccgccactgctggatcgagcgcatcgttgtcttcgtcaagcaagacgaccaccgtcgacgccgccgcctcgaccgcgagcaagactggcgagccttccagtaccgtcacccgagcgtcttcttcgaacgagaacgacaagaagaattcggcgtcttcctcgtcggccggactcgactcgatcgtgatgatgacgttggtgacattgctgggtgggaccttggcttactagctattgatcgagtggaacaccggacgtggtttcgtcctcgtcaactggccatggccggaagcctcacggacattattatgttgcttgtttttgtaactatactcacgcgagcatctgaaacgttgatgtatcttcgacgatcatatgctttacgatcaccatatgacgaatccgggtgaccacagcttcttgcaggaaccccaaaattgcaggctaccatggcaattgaacacagcttgctgaacaaacggtagcggatgttggccttcaaactggatcgatcgatctccggtcggaaccatggccgaatcccggatcctcatgtagcagttcatgacacgtctgtgtggcgattgcgcttgaaaccaggctgatccccagattgggcagcacgaccaggatctcttactatggccacagagagagagagagagagagagagagagagagagagagagagagagagagagagagagagagagagagagagagagagagagagagagagagagagagagagagagagagagtcttcttgcggtgaatccctgaagtgcgatttgaatcgttctcacaggagcattgctatcgggtcgatgaagcctggccggcccgatgcagccgcaccatgtcacccttgtaatacaaagagtggtttgattgcacgggtccaatgtcgagaggagggtggttgtctagagagagagagagggtgaaccaccctcatatggccagcagaccaggttgcattgacgggctatcttctcgaacttgggatcaggacagggaagagttcctgcatcgattcaacagggagtccgaccacgagcgaaatgatttgtggcggcctgattggatacctgtccattgggccaaaggggttcggttgatgaccttgtaatcgtaggagcacctggctcaaggaggagatgattgtaatcaagtttgaatgggttgggtcaagtatatcgccaaacaacctgcacggatcgaaaacatgaaatcaagacgacctgcctcgatcctgctctcgccgatcggtcgaacccatgacagaatgttcacgactacctgttatattcgtacgcaagcatcgacgatgtgaaacggcacccaaaacgtctgactcgtgataatcagagtgcagtgctggtggtgacggtaggctcgaatgccctgaacctgaacctggatcggcgatgatgtcgagactttcaactaccggctcgtatcggaccgaacgaaggtggttaatatctcgaccgttgacccgttgatcgccgaacacgacccccgcccgccctcctgtagttttttttttcaagcagaagacggcatacgagatgagcgctagtctcgtgggctcggagatgtgtataagaggcaggaatcaaggaaaaggatagcagaagaatggaatcgatcgttgcgatgccacttcctgccctcccttccccagccctgcccgcccgaccctcgttgctgtgcgcgtttcagctccgtgtttgtttgttattgtcatggtgttgttgatttcctaccaagacctttttttcctcctcccggtcgctttccaaccggaaaaaggaaaagccacctcgcctcgcccctcggccttgcgccctcgctgaccgggaccacgcggcgcgcttgtgaccatccggtcctcggcttcgggtcgaatagaacaacaaaggagatgtgccaagccttgccctccacgcgcgtcattcagcgaaatcgaaacctcggtcgaagtttaatgacaatctacgctctgatcatcatcccccgcctcgccaacagcgacatctcgtcataaaagtaccgaagccctattgccgatttcgactaccagggacgcctgatgacaagtcagggagcctctgctcgatgagatgagtagggtatccaatctcggaggggaggggggggactttcacgcatcgtttgtctcacccactcgggtgaatggtccgggtcctcgactcactgcctaggtaattttaatcggcgatccgctgtcgtttttctcttcatatgtagcatatccctggtgtcgagttcagtgtagacccatgaccaagtgcaactatgtgacgctgcccagctcctgaatctttcaagaacatcttacgccaagtcaagtgtcggttagtgtattgactgacggctcgcatgctcatcacctccgcatcgtttcgtagagcgttcttcctctgttgtcatgtcgcaagcacggtgatgacctttcactggcgtccggaccgagtaattgcggttcatactaggttcatactaggttcatactcactaggttcatctcctggcgcgggctgcggaggccctgtcagttttccgccggccaacgacgaggaccccgcggcaggaggcacgagacttcggtcatcacaatcggtgtcatcgtatctgtcattgcgctacaaaacgttcctgcatgcgcattcctttctctactccatcgcaaatcttggtgaccgtctcgtcgcctacaaagcatctccacccccgtcgatccatcggtttagcaaggcgagcgcttcgaccggttctgattcgcgagcgcgaacgggacgggtcagcacttacggaccgtctggttccctcgggtcgcagactctttccgactcactgtccatcgggaccatatgaccggccccttgtaccgtggcaaaagtcaacccgttgaaagtcttggtatacccagcgaccttgccgtcgacctcccaatccctaaactctgccgacttgtaccccttgctccccgtccactcgagcgcttccaaccaggcttcgttcccgatataattgcagatccagtcgtacgtccccacgtacgagatgacggggatcttgcgctcgagcaggccggcgacgtatagccaagtcatgtccgtctcgtcctgggagtcggcaaacgcctgggcgaccttgctcgagcaggtcgaaaagttgccgatacgcggggagacgccgaggtacgatctgacttcgggaagatcgaggtaggccgagatgtttcgcctagagtgcggattggcgcgtaagtcgggtcatcgggtcgacgtcgtcttctaggcggacgttactcacatggcctcgccataacacagtccatccgcaagctcgtcctgagtgcattttttggacacgtcgtacctgaaccgacggggcccgacgttgatcagctgacccgccggctagcgaccgagacgaaatgacgttgcacgtacgggttcaatcccaattgcatgaacggctcactgaaccgactcgcgcagaaatccatggccgcgccgcacccaatccgatcgtgccgtctaagacactcggtctccatcatctcgacgcaataaggtagggctttacgcatctcgacgcaattcgtgatcgattgtaaaggttctccgatcccctcgagcgaggtgcactggtacgtatagtaggcttcttgcatcttgaaggacgaggtgataccgttcccgatcaagacaccacggaggttgatcaccggtaggtccttcttggcgttcttggggttgaggtcatggatggtactggcgaaaacgggtaggtatcgaccgccataagattccccggccatgaagaacgggttcttttggaaccttttgaacgtgccgaaaaagacgcttaggaatgcctgaacgtcgagtgcggcctgttccgtcgtccccgtcatctggccgtgtcgtccgaaactgaaagagaccccgattggttgttcgataaagatcaagtttgcccgcgagttccagctgtatgggttcttggccgtcccgttcaagtgggaagggtcgacgatcgtacaggggcctaattcctggaagagacccagcgtggatgcgcaaccgggaccaccgttcagccagaggactacagggtcatcggctggggaatgtcgggattcgaaaaaggaaaagaagatgtctttcccgtgtccggcgttgatcgtacccgaatacgaagtgaccgaatcgcaccaatccccatcgtgcttcttgatctctagtttgtgagagggcaattcagggtgagagagggtgtagatgtgaccagggtggggttgaaagtccgagggtagcgagtcgatatcggtgacgacctggtgttcctgctgttggagcggtctatacgccaggatggacggaccagcagcagccgccagcaggcagagcgaggcaaacgacttcatggtacggacaatgggataggttcctgttgttagacagaagagtggcgatcggatacgtgcggcttgtgcgactagactctttatctatatatctatatctgactcgctgctagagctgctcgctgctcgtttgttagctgagcggggtgtccatgtgaagccggatcgatcgcgagatttcggtcaaatccgatgaaacagggcaaaagggtcagggcgggaatgggggaacggggtcgatgcaccgcggatacgatcaatcatgtcaaaccgtcattactagcagaatcaccggcctcgatcggtcgatcacctgctgtttaccttttcggtcaagcgacctgttgctaaccatttcttgaactattcaaatcgacttgcatgttacaaatcgatatcgtatatccagtcgaaatacctcttcacagccatcggcaaatacccacgcatcttcttgtcgtcgtcatggactttttctcgacgcctggaggtgacaagtacgcccgagcttcgaaaccgaacaccgtcaaacgatccatcccgaccccggtcccatctacttccacctccacatcgaattcgcataccccctcgagatcatcacgccccatcatcaacaggtctaaatctagcacgtatggacctggttcatcatccaagtcgacggcgatatccaggacgaaacccccacatgctagatcatcagcgacgccttcggacgattcaccgagacggccgaccacttcagatcgatggccgcggacgccgacgaaacggagaagacagaccgcagcttcttcttcctcctcttcctctggctcggattcggataaaatcaccaggacaccgcgaaagcgggcgaatatgggtaggaacggtggcggggcggccggggtatgggacgacgtcggggagatcaaaccgcgggataggaagcggagagaggtgttcgacctggacgctctcgaggggaaggtcgggagcgtccaggggttcgttcattcggcggatatggtgcggaggaatctgaacaagtatagaccgtgtgagttggccgtctatggaaatgatccctggcgccattgctcaaacatcgctcatcatcaatgtccttggcacctttccgggccttttcaatccgcctattttctcttcatggcccgactgcagactttacgggcaacacgacgaccgacccagaatcctcctctactccttctcccgagctgatccccgagatcgagctcgtctacccgtccaaaagatgcaccgagcggttcgttctgctacagcctaaacagagcaacgagtatcatccgatccaagaggtcttggcgtctatcggcttgatggtagaccgtgagtatctcgtgcagccatcgggatcccgtcacgagatcgcatcggttccgcacgatcgctgaactttgttgatgcaccatcccgtgacgcctatcagactacgtaccggatacgcacatccagaggttccgtgcgcaacctaccgactttttcaactcgcaatccagtcgacccaccgtcacccccctcgtctccctcccggcttctcccgcaccgagcacccccgggaccccttccaccccgttgttcacccagcactcggacccgatcgtccgcgcattacacaaggcgtacaacaggaaagatctcgccgggttcatcagcgccgtgacgaggttcaacgaagaattcagcaaactccgggaagaaggcgagatccggacgtacctcggcgaagaagcaggggtcgtccagggggagagatggagagaggtcgtcagcgccttgggggagtgttgctatcaacggatcgtcggaccagggacgacgacgttgtcagaatagtgagtccggctcacccctttcttgagcgcctgtatgggactgattctcagaccttgcagcgagccgttctcggattacgtctacggggaattgttacctcggtgagccgtcaatcgtggagatgcgtgtaggtacagcagacaagctaatcttctcgtcgtttgtgactgttctagctttgtctttacgatcgccgaccgagccgacctgaaagccgactctcgattgtgagtttgcaatagtcgattctcacatcgcatgtcttctgtcgaacgaatctgatcctggcgatcgccatgccgattatagcgtcgacctgggctctggcgtggggaactgcctgggcaacatcgctctatactcgggctcagccagtatcgggtgcgagtacatgcccaatccgtcccgactcgcccgtgcgcaaatcgtcgaaatgaagcagaggtggaagatgtgggccctcagggggaaagaagagtgcgaggcgatcgaaggcgatttctgcgctgatccggatgtcgtcaaggggctgcaaaaggccgacctcgtcgtgagtcgggcgggctcccttttcagattttgcacgggattcttgcgccattctccggttgctgacgattagggctccgctcggcagcttgtcaacaactatgcgtttactccagcactcaacgatcgattgtcgctcttgttcctggagctcaaggatggtaccaggataatcagcttgaaaccattcttgcctgacaagttcagactgaacgatcggaacgtgagtctttctcggggcccagagcctcggctggtcaaagcggtgatgattgacatgtcccgttgataggcctcttctccgtcggcaatcctgaggatgagagagttgccctacccagcagggagtgtcagctggacaaacgagtgagtaggcacagggtcccgcgagaacatcaagcaccccaacttcgtgctgactgttctctactcactgcctgataggggcggagtttactatgaacacgtcgtcgatcgaagcctgttgcgagccttttacgaacagggggcaaggcgcacgtcgaggcgatagttcgagcgggaatacagtcgacgcaaaacccgttcgcataacatcatcggcatgagggagaataccaggttgtacatacaaagcatccaaggcataaacgaaatcgcatggtcagaacaacctgttagtcagcggtgccagacccggaacgaatggctttgtccggcagtagagttggacgttccgattcacctgctgtagaaacgtattgactgcttcctgaaagttcagctccgcttggtggcttcacgtatcattggtaaagccagatgcgggataattcagaaagcgagcggctgaaaccgaaacatccgtcgagccctgtatacgtttggcgctgtcatatgagaggggatgcgcctgcctccacttttgtcacgctcgacccccctagcgagcaatcggatatgaccatattcggcttgcacatggtcgaaccctttgtcaactcgcaatactcgtcatgaagactcatcaagtcgtatagatcatagcaaaccaaacttttgcatctcggcataaatgtcttgtttcggtgcctagcagacaagaccttgaccgacaatagacgtctcgtctgaacaaccgaaacgattcgtcacaacccgctcgggtctcgcttgatgagagcgtatcgtcggaccgatcctgcacttgaccatgtctgaagcttcagatgtcactccactcgacgttctcaagtacagactctacaaagaggggtcgctgcatggccagcattttacggatggttctgccgcacacctctggcaaacgctttacgcctgtctgtggggtgaggatatcgactactttctgaaaaatccggcgtttaggccacattcggcggactggaggcggtacaagaatcgaggcacgccctggtccctgcccgatgctcagaaaaaggaggcagctggtgacaagaaggctaaagtccggaagggcaagatctgtgggaattatctagctcgaggagatcgttgtttcaactgcaagtgagtccggctcgtacgcctgcactaactcgcatgtctcaagtcgcctgattggatcacccttctacatcgctttcaggacttgcgccatagacaatacctcggtactctgttcggaatgtttcttcgcatctgatcataccggtcacgacgtgacgttcggcgtggcctacagcttttcaggttactgcgactgtggtgaccctagcagctggagccgtccgaccaattgccctcaccatccacccactgataatctcctagaggcatcgtcatccaacctcgtcaatccgcctcggcacgttgagctacccgccaagcgagctcaagcgatcagggcgacactcgagctcgtgctggactatatcatcgagacgtttgaggccggaccgcctgagggcaacgtcaccgtcccacgaacgatcgaagaggtcgtgttcgagactcagggagcgaattcgttaaagggcaaggtcaggctcgaacccgtcagcttgatcttgtggggagacgaaaagcatacggggaaagaggtcacacgacagctcacacatgctaccggattgtccaaggcggaggcagcgatacttaccagcgagctggacaaacaggtgtgtgggaatgtccttgctcggttgcgtaggcttgctaaagacattgtcgtggaccagggccgagtcgtcatcgagaccacggacaattactaccgtctcatccacgtcgcacaaacactcgctcagatcgacctgacggtgacgttccagctgagctcagagtcttatcgggaacaagcttgcggcgtgatcatcccctggctggccgaggtctgctcgtcgcatgtcctcgaggacgacctatttctccggcgccaggtcggagatgtcctcttgattccatccaaggtggggagtcaagctcctgatggccgataccgagtcgcagcgtcccggatggaaagactttttctcgtcttttcgcgattttggagggcacccaggattgcctggatgaaggtgtttgtgcggatcctgacagcggatatggattacaagattgcgctcggtcggtcttgcttcgcagagccgtgaagttatgaaggcgactaagttcctctgtcccgcaggtaacaccttcgcacggatgtatacttacctcgtggaccagtacctgttcttcgatcgagaatcagagctctcattacttctatggggtatgcagctgtttccagtacccgcgatagccacagccgcggtccgggatatggacatcttgcataccttgctgcaagtcttgacgtcctattttaccgaacaatttgaacatcaacacttgcggatacccccaatggtcgtgccgcggatagacgccgatgtcgaggcgttcaggacaaaaaaatggcagaccatgtttggtcaccttaaagtcatgctgcagagtaaaggcgtgcaaaagatactcttggatcaaccggaatctttcaacgaagtcgtcagctttctcagtctctttacctcgatggcgccgcatatccgtgcaaagacggagcatattgagttcgaaagcgatgcgtggatcagagcgctcggtgtgagcatggacctcagtcgagtgaccatctccctggggcaagtctttgaccgggccaatcgggaggggctcatccgcgccattaccgaagtcggactacacatctcgtataactcgcgactattatcgactgtattggattcggacaagtttttccctccaaagctgcatgtggtacgcatgtttgggcaagactttcaagtgatcgcgcatgatggggacttggaatggactagcattcataatccgcttcattggacgctggccgaagcgatcaagcggctaccgacgatgatcgagcgtgaacccaaaatggacgggccaggcaagacgacgcgtaaagatatcgtctcctgggccacggcttccagtcctgaagttaccgacgcgctgctcgctttcaacatgcagatcacaatcgaaaatccgttgcgaagtgagtcgtccgtcccgtgtgaggctcgccgagctgctactaacaccctgtcaccacagctgtcgcctatctagcccaagtccgagccgggttgtgggttcgaaacggcatcggtatgcgtggccaactgcatcattaccgcgaccacccgctacgcgagacgacctatgatcaggatctcttcttgctccaattcggcttctgcactctcgacccgcccctcatgctggcgagcttgatcgatcgctttggcttgacggagctattcaccgtaccaaattggccagccgaagtcgaaaacgctcagattttgcaactgctggaagaactcttactctgccttgtcaccttatttacggaaacgtgggcgatgcagactcgctcgcgagtcgacacaacgcgacgggaaattatacacatcttggcactcggcccgctcgccttttcagatctcgtcaagcgtctctctgagcgcaccgtagaaattgcttccttcaaggatgtcctggaagaagttgccactttacgagtgcccaagggcatcactgagacgggagtctacgaactcaaatcacgatattacgacgacgtcaatccgctattctatcactactcacgaaaccaacagaacaacgtatacgaaattctctgcaaacaacgcaagattgactgcatcaacccaccagtaccccaactcccgcctggtttgcccctttcggcgctacacgacgttttcgaaacgccgttcatcctattggcatgtcacgtcgttttccacaacacgatcgagatgaggaatcgcagcttgacggccccttctacgcctgctgtaccgcaaatggacggtctcatcgaccttgcattccatctgaccacaatggcggttctgtgtgccccagaaaattcgtccagtctagcgtgtgccaaacctgagcagctcgactttccgcctctgatctcggagctgtgcgacattgagcttgacaagaattggttaccgtaccgtccacggatatcgaatctaatcgacctgatcgcacgtcaggctccggagcaggtccgcgcttttcgcgctagactttcacaggatcagtcgacggtctcggcagacgaagccagaaaagctacgattgcaaaacgtaaacaggccattatggccgggttcgctcagaaccaagtcgcgttcgccgaggcatacaatgtcggcgaagaagacgaggatgaggccggcgagcagctacgctcctacggtcagtgtattgtctgccaagaagcgtgtacggatcagcggcccagcggcctcttggcgatcgttcaaccaagcaaggtcgtgcggaacatgagtacttcgcgagattggttggaggagtgtctgcgagtaccggagacgctaaatggcgatacgcgggtcatccactatggtttgggcaccggcgatcgtccaacgtctaccgacgcttacccccgatcagatcaacggttcggcctcaacattgcggtgtgcggtcatctcatgcacgaatcgtgtctcgagaaattcttcgatgacacaaggctccgtcaacatcaacaagggcagcgaaatcatcccgaaaacgtttttcgaaaagaatttgtgtgcccgctgtgcaagagtgtgggtaacattctggtaccactgacaacacaatccgattttccacccaatccgggcttcgctccacttaatgaatggattcgacgcacgctcgatgaggatttgaaacggactggcaagcgggccaaatcgctaaagacccactctcgtactggcgaacggatgttgtggtacgttgatgtcgccggggaggccgagactggattcttggatcccggtcaaggggcaatcctgatccgctacatcatgctcgtcatggcgatctcggagcagacgacgcacctgagtggtcggacagaaaagggcctctatgtgcctcaagatgtgatcgggtacacgctctcgctcatggagattgcccagagaggaatcgcgccaagcgatcagaattcggtatacctgagcgagacgtccgagcgattactccgcggcatgatgacgttactatggcaggaggagcagacggcctcgggagaggctgctgatccgatgctaaatcggatcgccatcttttcgactctacttcccgaacgtttccgtacgaaacctacatcatcggcgctgctactgcgtgatccgatgacgatcgtcatcgagacggcagcgttggctcctgacgccttgcaacccgtcgtcgtcttgtgctactttgccgagctcgtccgagccatgctggcgatcacgttctgggctcgcacatcaatgtcccgccctgccagcccggtctgggctcgatccgacgtcgatgcgcctgagtacaagctcgccatcgagacatttcccgagccaaaagcctttgttttgagctgtttccgacaaactccgcagttgctgcaggaagcgtcctcggctctcaacctgttgccagaacgcgacctgtccaagctgctctacacgttcactctccccttcctccgtcgcgcgtcgatgttgtgttcggcgatgaagacgacgttccctgttgcaggggctgcaaacttgacgggcgagtacaatcaacatttgcgacgactccggattccagctccggcaagcacgctcttggacgtcaaccaacctgtccaagcaacggctgtcagttggctcaaacagtggattcagctggacatgggtgtgcccgcgctagagtacccggggacctacgaactttaccggataccgaaaagtctggaggacctgcttcgattctacgaaaagaaggaatgtaatcgatgcggcaaggtcccgagcaccccggcggtgtgcatgttttgtggcgaatacctgtgcttggggaccgattgttgcagcgagggaagtatgggggagtgcaacacccacaggatggagtgagtccatgcgggaaacaaaaattctgatgcggcccactgctgagcggacgtgttcgttttataggtgtggaggggcggtggggatgtatatcgatctcaagcggtggacggccgtctatctgtatgcggggtctggatctttcggaccaatgcccttcctggactgtcacggcgaacttgatcaagggatgaggtgagtagcagtagcagtcggttgcagaggttgttgcagaaccgttcgattgatgtttcggcttgtttctcgatgatgcagacgaggtcacccgcaattccaacaccgagctcgagcggatcatgtcagacgcacatggctcggacacgggattccttcattcgtcgcgcgcaagttggagctcactttggatcagagcggatgggattcgctgtagacgagcactcgaacaaggcggcaggacgtgagctacaaggcggtgccacgggcaaggcaagctcggactgaaagaagctcctttggcaagtttcgaggggaagtataatatggcggagaagcacaacggcagagaagtacaatgaatactacgaaaacaatagccacgaagcgacggtatcgaccgaccacgacgcctttgccatctcgagcatagcgagcataaagaataatcgtcgagtcggataaggttgagcactctgagcaatcgcgcatgattctgcttccggaagccagcgatgatcaattcaagcgggcgatacgcgtgagaaagcgattgatgtttttctttttcgggcaacgtcgtggttcccctctccctgcctttgctgcctttggtctcctctctcgctctctgtcgcgcgcgcgcgtctctgctgcttccggcgccctgattatgccctctccctgccctgccctcgtgcccgttgcccccgggtggatcggaggagagcgagcgagatacgtgtgacgacgagagaagatgatatatataccacgactcgcgcctcctcggccagattactcgagacccccccaaaggtcatccgaccgtcgccctccactttttccccccctcgtctcctccccccccctatcttcagacctctctcaaccatttcgttcaacacattcaaaacatctgattaattcagttcatatacacctcgaaacaggagtgccacagcgaccatgggcagaaagaagattgtcatcaaacgtctcacagaagaccgcaacaggaacgtcacctttttaaaagtcagtcccggccatcgacgttcgggctcacctagacggtactaacctgacctgacttgacaacttctcgatagagaaaacacgggttgttgaaaaaggcctgggagttatctgtactctgtggagcagaggcaagtttgtgaaagacctcccccccctccctggcccgcgatcaaatgccggacgacgtcatgatcgacgagactgaccacctaccctccttccctccgctcgtctcttttcaacgcacgtcgttcataggtatccatcctcatcttttcgcacaatggcaagtgttacgagttctcctcgtccgacctggacagctcgatcgatcggtaccacgccgtgagtcacttttcttcctccccgcgcccgcccgggctgcgtgaccgttcccgcagtcgcgacgatcaacgtctgtcgtctttcgaacgcgccgtcccatccgaggctgacatccacctcggtcgtccacttgtttcatatgcatacgcttcgtcccctcgataccatactgtagtacgcgggtccgattgaacgacgtcgcgctcccgagtttgccgccatggccgagaacgggggcaaggacgatgggtcagacttggaggatgacgagcctgtcggaccgggaggggacaattcgaccgctcccaaggggatgagcctgaagggcaaggaagagtggaaggatgtcagtctacctaggatctctggtagtggacagtcgttgggcagcgtcggggaggtagggaaacagaccgacgggccgacgaggtcggtaggagggaaacacaccggtaatggcaatggaaatgggagctcgtcgagggcgagggcgaggacaccgatcgaagtcaagggcaagacaagggagatgaacgtctaccctgcctcgtcatccggactgggatcaggctcatcctcgggctcgggcatcaacctggcttcgcaaccgcaacaggggtcgacctcgctcgcgtcctctgcgctcgggataggttcgagaacagtgacggggtcgtggacgggtcaaggcggttatcaggacgacagagtgtacgaacggtcagagcctgggttccaggacgacaggaacggggggtaccacgagagggcaagtctggttcggggagcatgtgtgacgcgaaatacctcgccgactcgagctgacggttactgggatgggatgctcgtttttgcaggccccgttttaccctccacacaagcagccgtccatgtactcgctctatcaacaacggatcggttctcgccccgatccgcacgaccgtaacgatcccaacccgtcgtcatcgtcttaccgatcggatggctcgagatacccatcgttcgacggtcccgcaccatcctttcccacgaccgaacacaactcgtcacacatgggcggagcgatgactacaccttctcccgttcattacgatgcgcagcaacaacaagcgtacgctcaatactcgttgcccgtggatcatgggatcaacccggacggcagcatcgattggaacaaggcgaccgcggcggcccaattacaagcggccctccacgctcaacaggcccagttggcctacctgcgtcaacagaggcaacaacaggaacactggagggacctcttggctgccacggccggaggtcacggatccctcccgccaggtttcggtgcaggagccggcggcggtgcgatgatgggcaacgcggttcaaaggttcaacgacctcgtcgcggcgggtcatgatccgatgaacacgtcgaacgggttccagtggcccacccataacgggcatgcaggcgggacgtccggattggggctctcgaccagcgcagaagacgatgggcctaaccacctcgtctccatgtcgaccaatccggattggttttccgaaacgacgatgcggtcatcagggatccccttatcgacgcattccaatcaccccggcgagactcgctcgcccggcagatctcggcctgcctctccaatatcgcgtcaaccgagcctgtcggtcggtcagggcgggtacagcgagctgggcgagaacacgtctgccgggaaacgggctcggcaagaggaggacggaccaggctcgaaacgggcccgactggatagcatgtcgaatgcgggcatgccgtcgtcggatgcgagcggctaggcggtatcggcagggcaaaagaatggcacaagcgtcgtatagtttgtgaaacgttgtaacatccggtcactactagacctaatctttctgtggctttgtatatacggccggtccacgttacaatgcgattttgatcgccgcgaaatggctccctgccgattgtcgatcggacaaagccgctcgtcgtgccgcagtcgacactgacgtttacctcaaatgatttcgtcatcgccttgggcccagtagatgacatgcgaggtcctagcggtagggacaggacgacttcgcgtttgacgagattatgttgcttttgagggctagctaagatggggaagagcctttctccgccttgctatcagactctggtcttcaaaacccgcaccgaggtcaaagagtacctatttacgtgcacggctttcatgaggcggggaataagacgacaacaagagtgtccttgatgaccactgtcatgtcatgcaagtcatgtgcttttgtggcattcaaattgaatcatggcaataccggtaaccggatttccggcacacggttctgcccggttctcatgaggctgcagggcgagacgttctactcgatcgatgtctttgctgatggcgggaatgtggatagaggttgctgcgaacaaggccagagggcaacgtgacattattgtccgcatgtctgtccacatgcaaaacagccaaatatggacgtcttgttcatgtggtacgtgccgtcgtgttcgataactgacgcaacagcctcgcaaccgagcccccgttctcatttgccgtgggcatgtgccatgctggcctctaaactttgacacgatctggcgccgatggccgaagaaaccctgtcacccagataaaagaccttaaaatgtccgaggccccgtggcaggcacagaacaactaacgtcatcaggcactccgccgatcattcaaccgggggcgtgggggcaatcacatgggtcacgggtcatgaggctcacagcctctcccgcgtatcccccgtaaagtcggcaaactcgctacaagcgcgggcctcacaacctatgatggccgcaatggtttggccagttatagacggacgcagaacaatgtaacacccgataaactcgcgaatttaggccgacggagtatcaacgtcccgaagcgaccgggccccatgggccttgccgagaactatccggtgtgcagcgctcatgttatatagaaagctgtcgtctccctttacggactgacgagctgcgtaacatcgtcgcaccttcatactatccacagctgtcccagtttctcaaccatctggctgcaaccggtccattcactatgtcctccaacaatatcgcgcctgcccctaagggtcaggagatcgaggagaagtatgctgtcgagcacattgacaagcaaaacaacttcaaggaagatgcggtcgaggcggagaacagggagcaagccatgaccatcatcgaagccgtcaaagcgtaccctgcggcttgcgcatgggcttttaccatgtcatccaccatcgtgagtatcatagacgggatgtcgcccgcttctgtgctttgcttatgcgcgtattgcagatcatggaatcgtactgtctcttcctgatgggttccttcgtcgctcttccagcgttcaaagagaagtacggtatccaggacgcggcaggcgcctacgttcttgagagctcttggcaatccgccttgcaagtcggtggaccgttgggcgcgctcatcggtgtgttcgtggctggacctatcaccagcaggatcggataccgttatgctaccatcttcggtctcatgctcttgaacggatgcatcttcatcatgttctttgccaactctctcggcgtcttctttgcctcccaggtggcggagggtatcccttggggtatcttcgtgagtcgccacaccattctgtttcgatcattggaacatcgctgactggcctcccacgccagatcgccaacgccccggcttactgtagtgaaatcgtgcccatgaggctccgagccccggccactcaagtgctgcagctcttctgggcgataggagccattatcgttggtggtgtcacctacgtctatcaatcccgcgacgacagttccgcatggaagtaagtcctcgccaggaagttcgaccctttctacccctggtcgctttgcttaccttgcgccgcgatcgcagggttcccactgccatccagtggatcttccctacgcccttggccgttctcatgttcctcgctcccgagtcgccatggtggttggtccgcaagggaaggttggaacaggccgctcgatcggtagagcgtcttggtcgaaaatcaatggtcaacggtccggaagccgtcgccatgatgcgtcgagtcatcgaggccgagtctcaagagaaccccagcatgatcgagctcttcaagggaaccgacctgcgtcgaactcttatcgtttgctgtatctacgccgcacaaaacttggctggaaaccttatcgccaaccaagccgtctttttcttccagcgtaagctcggccttttttccctttggcctgacttttgctgactagtcactttagaggctggaatggacaacgataccgcattcgcccttggtttggtcacgtcggctctgcaggccgtctttgtcatggcgtcctggggactgaccgccaaatttggccgacgacccatttacatctggggtaccgggttcaacgtcgtcatgctcttcgctcttggtatcgccgcgtgcttttccaaatcaacggcatcttccaacgcccaggcctcgttcggtctcatcgtatcggtcatgttcaccttcgccgcggccccgatctcgtgggtcatcatcgcggagacttcggccattcgactccgacctctcaccactggtgtcgggcgagcttgctactacatcgtcaacatcccttgcatcttccgtaagtcatcgcgccgcgaaccccgaatagggtcacgctgatcaatttaaacccaatcagtcggaacttacatgcttaaccctacgggagccaacctcggtggaaagtgtggtttcgtttggggtggtaccgcggcattctgtatggtcgttgccttcttctgtctgccggaaatgaaagggtatgtgaaacgcagtgccatgtttcgttgctcgactcgggctgacccggacctcctctttcagacgaagctaccgagagatcgatattcttttccgtcgtcgcgtttcagcacgccagttccacaaaaccgcgatcgacatcagtgccgacgagtagagtacatgtacacgcatgctcgttacagacggcgctgcaagcgaaggcattgtggattcggggaatctgatacgcgctcggacaaaacaaagcttgtttgctacctgcgacacattgattgggttattcaggagccgaattgtaataaattattgttttccgtatgtatcaatcgggtttacgcttagcacgcttgcaagagcttgaagacgacacgatgggactgattctacgggatttgcgggtcaatcgtgtggtcccaatatcccaatgcatcatgagtttcgtagtcccgctatctcggtccgaccgatattcccgaaccgcgagtcccgaaatttaccacgtgattttcactcgaatcgttggtgaacccgtgatatccgggtcaacatttcagctcgatcatctttggaataatcatgcacatggtcgcatggtcacccatcaaacgagatggatacaagagcaagatatggaagatacctcgttgcatcccgtcattgcattatagataaatctccttttcaacaacttcgcacatttgggttccatttccctctctctctccatctttcgacttggcgcctttgttaacaagcgtattcgaacaccttcgacacacttttgaaataccctcatgtggatctcaacgaccccggcggatctgctcgataccagtggcggcagtggtctcggttgctcagcaattgcttcctctatcaatctccttgaacatcccacaacgatgactatcgatagcccttgttcccattcgctgcagcgactacaaagcgatggatcgccttcacttgccgcgcaatgggatgctctggtcgagatcgaaggtgcaggaagttggccacctcagcctgctcgtccacagccctcagcttcagcctcttcctctaccactagcgagtctgtctctcgtgacacactgtcatgctcttggtggcaatcgtatcactctctcgccctatccatcgcctctaccggtcggttcgtcgactcagaagacggtctacatccatatcgttccgagtcggacttgcaagctaggatcgaagggaaccgcacctggttggcgcaggagctggagcgagtcgtggtgatcgacacggtgatgcggcggttgaacgagtcgctggcactcgacagcccttcaggctcggcttcatcttgcctcggcttcctcgcctgcctggcctatctcgcccacctttaccgatgggggacagtcccagtcgtttctttggcgcaagatgagagggtactggaaatgccagaggccatcagtcgaccaatgaaagtgctggggaaaaggtacgggttgaagacttccggagggtgtaagtcatagagccatgggactcgactcggcggggcggtgctgacttgcccgtaattgcgacttgactgcaggtctctggaccatgacgctactcaatgtcgactcgcacgacaacgacgaggatggaatcgtctactctaacatgcgacaccttcgaaacacatacccagatgcttgggatgctgaacgtctcaacgcgttgatctttcacgacatggaacgattggccgtaccattctatcgcgcgatcactgcgctcgagactgtgtccatgaccagcgaagaggtggccacgacgcttcgcaccgccaacacctcactcaaagccgcgttcaagatatttttcgatacggttcgcgaggggcggatcaagaaggatgtatggatgtcgcatgctcagggattccatggatggggtatcgacgactttgatggtgtctcgggggatcactcgttgttgatcaggacgttggatgctttcttgggaattgtgaagcataccgtggcagaggtgccggcgccggctcgaaacgagatggaggtggacagtcgaacaccttcgtggccatcttgggtcgcgtcatgggtattcccatggcgttggggttctgcacacgtgcaaacaccctcatcgccgcctaccccggcctttaccgaggtgccttactcggacgactacttgcctactcgacaggtcgcttggatagcagccgttcgagcagccgaactccgaccccgactcgctcgtgaggctcctgaagaactcgccgagacgatccgtctcttgcgtttgtggcgggcagctcatacgcgcaaagccgtgtactacgagaacttggacctcccggagaggcggccgatgacggcgagtggtggtgttggaggcggtgtcgcggatggcaagacggaagacgtcggcgagatgattcggaaactagaggcgaggttgaaggcgaggatcgaagcgacacaatgaggggtatgcaggccatgggccgatttcagttgcataaatcgtgaatctctttgtttagacagcataagcatgatcctcagacttgaggttcttcatttggaccggggtgcacagtcgagcgttcccctcttggatagatttgagctgtgttaaagggcttgcaaatgtcacccgacatacgagtgccgatgttatggtccaaaatgtgggcatctatgcaacggtaaaaggacacacgccgccatgtaaggcacagtcttgtacgacctgtaaaggatttcgctacgtgtccaatccattttggagccgaaaaagccgacgcatcgcttggtgatcccgggaatgtcaacgacgcccctggtctacagtttccctccggcaaggcttgtctcgcaggagtgcaaagtgcgatcttcctgcacagcacaagtcgcgcaagctcttgaataccactcgcatagacaaaaatcaagacgctatgagtgaagccaaccagacaagggtgcttgtaggggatgcctgaggtcgagtttcgactcccttatcgtgcgctttgtaccaaccgcacgagcgccatttttgttcgtttactcgccgccattccgcggtctgtttactcaagcccagccggtcttgctgttcgaggcgcccacaggtcgctgagcacgatcaatgtcaaaatgaggatcggacatggcatgctgggcgagccaaaaatgcccgtcgatgacacaacgactgagcggattgcgaagatgtaatttagagccagaatgttgaagcggatacgatcaaggacgaccaacagagcacgttgctgggaaaggaagtctgattttgcttcgctccggttgcccggtgttgtcacgctgcctggttcgacaatcgactatctgctgcagctgtagacagtcctgccgaacgtacgtgatcgtccctggtggacttcttgataccatggagggactctgggcatttgatcttggcttcacgatcgccctggtaggccagatgggagtcgatggctccttccgtgtggaatggaattagaatcagataagtcatcgcgtgcgccacactggtctcaaaatgtgtcgaatgctacacgatgtcgagaagaaggtaacgaggcacgttctgcagaagagggagtatagcccacgtgcgaatggttctccggtttgaagacagaggaagggtgcgacttggatgtgtcgagcgaattgcgatggacaggtggtatgccagaaaatctggcctccaggagctctcgcgaggggaaagggtcaacgcccatcagctcttgcgagggttgttctattctatagaacgaaatttcagccaagtcagcttaccgtcaaaaaggaggctcagcactcttttgagtagcaagcgactctcaggacccctcagtcatgttagcaacacggccagtgttgctaatacaaacagcatcaggtgtctcggtacatctcatgtgagtggttcgagtgaccaacttgacaaggtcagcctatgttcatgagagatcctagacttcagtaagaaaagcagaaccaatatcatatcacacacctgcaccggatttttcatgtctaggtgggatgtgagaagcccacagatgtgcttgacaagatcaagggagatgggcttgggaggactttggccaggagcgctcatggtcgcaacgtcattcatgatcttctttttcttgagaagtcatagattttgtgccgagttcattcacatcaagcactgtgtcgtataaaggctagtacaccagattctgatgacttgagtcttatgttctggtgatctgggttcgattcccagcacggtgtcttcagagatgattttttgccgtggcagaaagtccacggatttttgtcgccgcttgaacttcgcgctggctctgacgcatggcctcgcagattggactaaccctttgcccaaggatgcgtttcgatgggcggctgcgctcgaatgcagacgttcaaattgaatgtggagctgtcaggtgacagaccagggcgagatctccggtcatgagactgctcgacacgacctgtcgcatgatccaccactgaaacagggccaccggcgcgtgagattgagaaaaggtcagggagcatgtagtatgtatgtcgctatacaacccccaaaaaaacatcccggggaaagcagtgaacaaaagtccgactccctcgtcctcttgcatcgccccctttacccccgtcttttcccgtcccggccaaagagcactccccatcgttcccgtgagaaatgcggtccggtcgagaagagctcggtgaaagaccatccccctctcgcgtaatcgctcgttgaccactccatctcgcagcgcttgcttagatggtggaagggaagagcatctgcgacgacgatgacgacaggggttaatgagcctgtaaacgacgagttcgcccttgcacattgtactcacgattcgggcgctggcaccgaacgagtgggcgggcatgttggacgagaacttggccttgacgacacccgagtttccgtgaggcctcgagacacgtccccacattacgcggaccttggaaccggcaatctccctcttggccttgtagacgtaagcgacacgctgtgagcaggaaaaaggagcggattattagtatcggggcgattttctcgtgtagatcatcgggcggcgagggcaagggcggcagagagtatgcgaggcaggatgggtcaggcgggaggcaagagctggctaggcataggatcgggctccttgatggtatggtcgtcgtgctatagactggaaatgatgctgggcggcgctggtataccgtcattcatcgagaagacttgtcgccggcgccgcgaatgtcgagaggttccgcaatccgttcataccgtctccccagggtttgtcggttgggtctggcgagtcgaatgaccatgtcgatgaaggtcatggccaaggccaaggtgtgacggaacgtagcgtgtccgtctccattgatgtttttttgctgtccgcagcccgtccggtcgaagtaatcgagtgtgtacaccatccggtatggtgtgacccgtgatttgaatttccatgtttgcgtggcccctgatccttatcctcttgcccatgctagccagcccacatctcccgcactctcctcatctcattgcctttgcctattccctgccaccctggcctccgataacccaaagacccctggacaaacacccacctttccgaggtagaactgagcggcctccttgttctcaacgccctcgatctggacgagggtggtgttgggtcgcgagttcctctttgcacgcttgtgaccgagaacacgagccttgacgtagagactatttcgacgagtcgagttgggcgggaagagagggtccagggagagaagtttcgagagggtcgaggttcatagttgggtcgaaagagggattcatgcatgtcacggggaaagatgaaagaggtttagggcgtcagtctctcgatactccaacgtgttttctctcccctcgctatcatccgttcatcgagaaaagactaaccgagactgtaaagaggaaccgaggggaaaatcacagggaggacgatcacggtcagccttttccccactcgcccattgcgaaaacgtagacgtcgtcgtcgactcacagaagccattttgtgcgagggttttttggtgtccgttgtcaaagttgcttaccggtatcgaaagggcgtaggggcggaagtcgggggtcctagttgttgtgtctcttgatgattgagctggttcaaggtcgatggtatcgattggccactgacctctcccggttgcgagcagagtgtctgggctgagggacggtgtgtgcgtgacgagagagtgagcagcagcagtagcagcaagcaagcaagggcaggtcctccccccccggtcacagccaactacagacacccctacacacacgctgtacccaaaccactgagcccatgggcaccacccagcccagcccgtagcttggcccggacagcgccacagctcaacgaagcagtcaaaactggacactcacgcgcgcgacaaagataaaagcgcatttccccatttcgcgcttaatcgcgtgatcttggtgaggatcagagggtgatctagagctaagactctcagttcccctgacctgctcgattacctaatcaaccctctctccctgcgcgcgtcaccaatccgactttatcgccgaacgcccctcgggacccacccagctcgaccagctcgcaactgacatcgtcttgacaacacatctacctcctccccttgttccactttgatctcgcccgcctcccccctctctcctctccaggcctcgatgcgagtaatcagactcgctctctctacaccgtcccgggaagacacccctagggtatttctggatctcaggtggagcaggagaaacggagcgagccgccagaatgagaggatttttttttcgcgagtgagaatgcccgcttctctctcttcttttttgcagagagggatatctccctcggggaaacctaggggggaggacgtggctcgtaccggttcaaacgctcttgttgcccgtttgagccggtcggccgcagcttgtacattcagtcctagtttagtcacgttacgtcacgccattgcagttcacgatacgattcacgatttgggatttgcgaaacgaggttgaccagtctttcatcaaacgtctcgtctcgccacgtcacttcttcgttcgatgatcctgaaacgtttgtcgtctcttttggtttcatatcaaggagatcccatgatcatggcccatctacacatgcctccgctagctctgctcttcttgccacacgtgccccgcctctcgaagtgcgggacatgacgtgacttctcgtgcccgcccgcccgcctctcagaccatccccccgctcctaccacaggcgctcacgccgcccgaaccctagccaaatccctcccccccaccgaacgcgtcatcctgctcgaacaacgctcacacctcgcccacctgtacgtactcccccggttcgccgtcgtagaggggtacgaggaacacgcttttatcccgtatacgaatatattcgccgggtcggccgaggaggccaaggagggcagacttcgaagggattcaaacgcaggtggagaggaggcgggcaagactagttcgggggacggagagtcggtctcgatacaaggttcagggccggatcatcatccggataaacaattggaagatctacccaaggaaccccgggcagagtatgtgcagagtactgtcacgaggatcacgacgagcgaggtctcgttcgtccggcatcattcgataaagaagcaacaagagtcgagcggagggatgaacggggaaagtgcggtcgagacggaagaaaagggggagacgagaaggttgaaatcgggcaagaaggattcgacagcgaagaaatcgatctggacgttgaacgagccggtcgccccggtcgcctctgggtctcatattcacgtcactgtcgatggagcgtcagcatcgtcatcatcagaagagacgcaaacgcaaacgcaaaagcaaacgcagacggtcgagcttttgacccctccgcctagcaacggcaacatcccgcggtcaagcacgtttacatgctgcaacgactgcatctcgccctcttccggatgttgccaagcgtcgtcttcctcggcggtctcgcccctgaacgaaggagacgatggccagacccggtcgtcgtcacacttgcacgcgacaggtccaggtgggttgttgaccccgcaaccgagcgtcgaatttgagatcaaccctcgggatcgatccgtcgtaaacaacatcaacggcaaggcgctacgaggtcgaagttgcgccacctgcctgtccaactcggagacgtgttgtcaagcgacctcggcccccgtctcctcgtcgtcgacgtcaaccacagggaccgatccgaaccagatcgaacccgtcgccggtgggatgcaaccccccctctcttccctcgtcgaaagcgccatcgtcgatcgggacgaacaggaagatgtgaccgagacgatccggttcaagtacctcgtctacgccacagggagtcggttaccccatcccttgatcaggctgcccaagaagaagatggaagccaaggattggttgaaagagaatcaaaaggctgtgagggaggccacgaaagtcttggtcgtcggtggaggggcactcgggattcgtgagtgaaggcgtgggcatagggagaaccgtccgaatcggatcttttccgtccctttccgggtaactgacccgtcccgactggctactgtttgcagagtttgcgagcgatatcaaagcgtactttcctacgcaccacgtcattctgatcaattcccgttcccgattcttgagcatctatgaaccagggatgcatgacctcatccaggccgacttggaagccctcggcgtcgaggtcaggcacaacgagcgggtggacgacttggcagacctggaaaggcaacgagacgaggcggcctggcaaggaggtcgggaaggcaaggtgggaaggaagatggtcaagaccaagctaaagagcggggatgtcatcgagagcgatctccaggtcagttgccgatcatgacgactgcctagggggatgtcgagctgacctcacacctgtcatttcgctagatcatctgcacgggtcagaaacacaaccacgagttgatctcgcaggaagaacccacgttgctgagcgacaaagggtcgctcaatgtaaaatcgtcgatgcagctcgaccacccagactggaaccatgtctttgcgatcggtgagttctgccaatgcgagtcgccaagcatgcaactgacccgctctggttgcgacaggcgacgttgcaaatacctcggccatcaaggctgggcataccgggtggtatcaagccggggtggccgcggccaatatcgtcaagatggtcaaggacggcgagtcagcagagctggacgattacacgccgacgaaaccgatgatcaaggtgaccgtaggcaaggtgcgtcgacgacgctgctgaatggcctcacacatcgtcagctgacgtattgctaccgctcgcagaacatcgccgtcactcaaatgtgggatgaacaaggtacacccaaggtctcgcgagccgaggaccttcccgaggatctgcaggccagtctcatgtggacagccatgggagcggataccaaagacatgtcactgtaattcattagacccatgtcctataataccacgagatctcttgcgacctgtcacactcgatcattatgcaatgaaaacggattcatgacgttctacaagatgccctcggctgcgcgtacatggtcagatttctggcgtctaagaggtataagaaaggtcgagactgcataggtcgttgcggaacaaatcggttctgagatgaaagaccaaagccgatcaggcgtcgacgtccggcagaggaggcaagggtttctctgaggatttcggtgaaggaggagtcccgagattcaagctggacgatgtgggctgggacttgacaggtaattctgcggaaggcccagcgttggtagggagctctgctagcggactggatgccgaaagagggcgccgtaagccctccaccgtctggttgccatccgtatcaggactggtcaccgagacggcagggatgaccacatgctgcgcatccgaactggcgggggaatcaagcgaagctcgagtcttggccccactatcctccgtatccacgccgagcggtgtgctccgtggccctggtgacatgttggccgccgaacgctcgtcatccgagagcgccgtccggctcagcttcttgggcagacgcagcttgtcagccacgtttttggcattggcgacagagtgactttgaacagccttcttggcctcttggatccccttgtcccgcgcgtcaacgctcttccatcgtcgccagccttcaaagtcgataagagcctgtagtgatggacgacaagagtctgttagcgctctgcaatacgatgttcttatcctctcgccactcgagctcacctgcatgcaaccccactcgataatcttggtttctagccacttgagtgagacaggtttcgtcaagaaatcgttgcatcccgcagccaatgcgttcactcgatcctggtggaaggacgatgcggtcaaggcgacgataatgacggaagatctcagcggcgtgccaggaggcatgaggtcggctacggggctgagagtcttgtgcgaatccaggctaggcgttgaagggaagaaaccgatgttgctgttcctctcggctgttctgatcgctttggtcgcttcaataccgtccataacgggcaattggatgtccatctgcaagtgcgtattgaaggcatcagatggtggctcggccgggttgtgagtagccagggcttactaaaatcaaatggaatatcccggttttccacttatctaccgcttcttgaccgttgttggcggtctgatgcttgattcttcgctttcgcaagaacatggacagaatgttctggttgatagggttatctatgcgcagcgaggttgctcttggttaacgctaagcaggtaggacagccacccggtttaactcaccttcaacgatcaatacgttgataggcggcacaaccgtcactgccttgttagcggccgctttgcctgatttaggtgcgggctgggcttcggcagccttgagttccgccttggctctggcggttcgcatggcctccactgccatcatcctccgtgtggcccgctcagacaagtcttgcacggcgggagaggataccatctcggcgacctgttcgacagtgagggtttcgtcctgagaagcattcgatgggtacgatcgcaaggccggtcgctccgtctgtgatgatagagttgaagacctctctcgaatccccgcaaccgactctccagagacacgacgacggccggacgagatacgcacgtgggaacgagccgaaggtgtggtggcgtcatcttccgctggctcagcctcgtccgtaactggctggaggcaggatcctcgccggctactccggtcttcgatgctcgaagtggtcgacatgcccgatagccgtcttgcgggtgatgggggcacggaagagggtttgttgttatcggcgacacctcccgaaccgttacgactggcattgctcgtcttgcgacggagaccctctgcgttgctagaagctgtgcggcgattctccttgctctccggtttacttgggtcgaagaagacgcccatatgcatacccgacgcgttgcgaacaaagactccctgcgccgctgaagcagatccgtgcgctacaggacgagcaaagtagctgccagccggagtcgcaacatactctccaccgggagtcgagatggcgaccgatccgtcgtgatgccggcctggtatcccttcgtatgagggcgatggttgaccgcctcgtcgatacgatgacagggtggagtaatcctgcccaagataatctgtaccatgactatttcgtagcgggctctcgaggggcatggctgaaggggtctttgccgagaagggtggaaagtagccgccgccaggcgatcgaggagacgtagcgatgggcgtaaagaatggatcgacgagtggccgctgcacagcggtgtgcaatgcggtaaggaatcgccggggtcccacgggtttagggatgaccatgatttcaggaggatgagaccagctgctggccaaaatcccggcaacaacgtctcggacgtgattatatttggccaagctggtgaaatgtatgaccgcggtgggttgcgtcgagctgtttggcatcgtcaggccctccgcctggagcgtccttacgtggggcgaagatctggtcctggaagccattgaagggcgtttgagcgctcgaggtcgcccaccgaatgccaaggattccgatcgaagcttgatgagctgagccttcaggatggccacgtcgtcgtcgatgatgacgaaacgttcaccggtcgacgtgccattttcgtccggcttgaagcctgtcgacaaggcggagagcctgttcgacccatccaacggattttgtccgttttcgcccatgtcgttgctcatcgagggccgtctcgagttgtcctcgatcggaatgtgcgaaacatccataccccatgcggccaagtagctggtcaagtgtcgggcgaagatactcatcaggctggcgtgtaattcgacctttttgccccgtagtgttgacgcaaacgtcgagagctcgaggagcgtaggctcccgatccaacttgagcgaagggaatggttgcctggccgcctgttcggctgcggacagcgccgtggtctcgttgatcggttctcctcgggccaagaggaccgaaagctcataagtccgagtggatccggcttgaccgggtgtaaagtaggatgactcggtaccgggtccgccttgacggagcacagcgttgacgtgcttgacgatcctcctgcacaagaggccatcgaaatcgggttccagcctgtcgggcaggtcggtcgtgtcgacttgcacgggcatatccgcacgaggcgtcgaaacgaccgaaggtttcgaaccggccgtgaaagtatgaacgatttcgacggtgcacaagaggggtccggacgatccttcgacggatcgaaccatggtttcgcccggtgagatccttcccgtctcttccgtcatcgagatttgactcgctcgtttcgtatcgtccatcccggtcgcactcagtggcatattgactctaggcgtcaacgagggtgattgcggcgtgacctgaagcccgagctcgagcgtgtccccttgtcgacaaacttgtaagatttgacgaatgacctgcgagacgtcagatcaatgtcagctgtccgcacgcagatacatgcactcttcgggttgtttcgactcacatagctaagagcgtaccccagtccttccccgtccccactgacgctggtatgcttgatcccgacgtccccgtggaacaggacgatctccactccagcctgggccgcctgtccaccgagcaaatccgccgtactctgcaacaactcgccgatatcaaagtcctcgggagccttgtgtgcattatcgaggatcccggacatgtggggctgagggatcgatcgggacgagatggccgaggtggcgtattccgaggcgacgtcggtccccgcgatcgtctttggcggaggaggcggtacgctgggtaggccagagatgtcgctggaaagatgcatgctggattgcctcgatgcgggtacgctctgtgatacaccgtgcggtgtgtcggcaggcaggtcttcacacagggacgcgacgttggccgagaggtaattcaagcccttcatcgcggtcaacaatgccgataaactcgttgtaggcatctggacggtacatcccgagtactgttccttggcgttatccagcaagtgaggcggcgagaggtgcaacagcgtctggatggccgattggagcgagtcggaaagctcactcgacaatgtctggagcgcgacgtggttcgtcgccggggtcacgacgtcgctcgtcaaccctgataggcccgacccgtccgtcgtcaagggtggggtctggaatgacgaggtcgagtcttgtctcaatctactgggtggtcttgcgaattgcttggcgaccctagcgggcaaaggacatgaatacgtccggttgaaaacgggaggaccatagtcgtcgtcaaacaccccatcgtccggctgagcctgaccttgatcctcgtccgccgtttctgttgcagaggcaccgccgatcgtcccactcgcattggtcgaggacgcgccggacaacatgcgtccattctcagagacgtcggattcggagctcagtcttctggcccagtcagaggtgtccccgggggtcatccccccgctcatggtggaatctggcgtcttgttcatcgtagcccggttgatatcgaggctgaacaacgaacccggtcccgatccagacggagggacgttgagtccgctcgcagcgtgaggaggagggagattggacgggaggagatgaggcgggatatcgctttgtcttcgcggagcaggaccggcggtccagggcgaagaagcggaatgtagtgtggtaggcgagtgtgtaaacgtccctcgagcgttctacatggacaaggcagatgcacgatcagctcgactttcctctcctcttcaaaatcgacacatccaagccccgactgacctcttccccgcgttcccgggaactccttcgattcctcctggaatccacctccccgaccttgcccgtcatcgtcccatagccatcctcggacccgtcccttgagaaagaaccgagactcgcggtatccccatcgagaccgatggtattccgacgagattccaggccgaagacgtccaggttcttcgggtgtggtagtaggcgggaagaagtcgggtcgataggttcgacaggatccgtatgttggaaggtcgaagctgatgaagaggaagcgggtatgggatcgtggggaggaggtggtggtggtgatggtgattccaacgggaatgagccgggtacaggaggtagttcacgttcgaccccaccgtacgacattatacgattatgttcctccatcctcaaggtggtccgggtaaaccgatcgttctggttcctccgagttcggttcagatacgggcgttgccctgtcgaaggacgtcttccgagatgatccctaagcctaatgctgatctactgggacagatttgtgtccagggagggggtaccgatctctcctgcgtataggtaacctggtagtctatgtacgtgtgccgggcatgtcgatatcgaaggctcctgtgagttctatcgtctcacgcgagggggggtatcctggggcagagcagagtctattgggctgttgatactgagagcgagatggaatgcaccttgcgaagcccttccgatctggaatcgatctagggaacctcgcctacgacgacgacgacgacctgaaagaggatgacatccgaggctgcggcgagccagaaacgggaggtcaagggagggaatggctgacgcggggggagggacggggacggcacgacaaggggcgaggtggacacggacatccgggtgtttaattcggggatgccagcgatcaccattgaatggatgtccgtcccgcgcgggacacgaaggatgacggcattttgatgagcgtttcagatcagttgatgggattgatggatgaggctttttcttgcgcgcgcgtagcggagacagcagcgggaaaggggaaaaggacaattcagccggctcatcacgcgcgatcgagcggttcgaacttggaaaacagtgatcgtgcagaaccccatcactatcaggcgctcttccacacgtcctcgttcgagtctggactgatgatagtttgaatacggcaaagccagctcatgtatgacattccgcttacatcccgactagggagcccaccgcaacatataagcactcaccagatcttgtgacgagtccaggctactcgaaggtcgaagtcaatcggttagtttgtcttcccgtgtcatgccagacactaccctctccgtttcaactcttgtcaccttcaaaaagggcccctcatcaatccttgcgtacacccgaagttacaaactctcctccaaagcgagtggtcgagggcgattctgccgggcctcgactccggatcgacagactctgggcacagcagcggtcggaaaggagatccgacttgcagaatctcttgctctgcactcgaccaggtcaacgtatcgatccatcggtcagacgatccgcggatcacgtatccgctcgctttttcctttttcccctggtcggttcaaagcgtggcacgagaccactcatcttcgtctctccccttctctttgtttcgatccgcggtccgctcagatccgatgatcacctctacgtaaggcctacttggcgaaaggtatatgaaccggaaattgacgagcggaatgaactgatggaccggggttttttcacttgtcagaccattcaaccgggtcatcaacctcgatgacacccatcgacccgccatctcatacactcatcggccgaaaccatcactcatacccgtcatgctacccaaagtagcaacctgttgaatgacgagccaagtgaaatgatcttccaaaggggaacgatcgatttggatgtcgagaatgccttccacggtcgagttggaaagggatgacgagggaaaggacttgatcgacatcttgtcctcgggatacggtgtcatgaatcgatcaaggggatatcagcgcattgaagaggagcaaggtgagtaggaaaggaatgactttggtgatagtaatcgtgtttgaagtctattatgacgagctgacgactattcaaacttgatcatcatcagttcggggctcatcaaattacaatcacctctcgttggacgaccttgcttctcgccatcacacccacggaacatatatataaggcaatacatcgcctctcgacgaccctatagtaacaaccagtgggatcgcaataacatcttgctcgacaaccaacctcatcgactgccatcactcgacctcgactcccacccttccaagatgacctcgatcctggcttcgacacctccccgtcccgatcatgtcgtcgacaaggagaaccaagacgattctgcatctcgagcaccgggcggaaggacgatcatgtccctccgaccgaggcataccaagcctaccatgcaccccgctccaacatcagcgacgatgaccggtaaacggatgaaatcgccgtatgaacgacctcgacgagctaccgcccgtccgaaagggtttcgtcgtcccaagcagaacccgggtccgtgtgccacgacgaccgagctcgacctgggttcgatgaggaatatgagcatcacccagcctaaacagtcgaacagggtgcagcaggatcaggaccagtctcggtctcagactcaggatcaacagggtcgcttgttcaacccctttggaatcaacccgacgcatataatcgcacccatcatcaccgccaaaggaggtcgtcgtaaaccacccccagcgaacctgatgatcggtggcgggacccgtcttcaacgacctttgcctgggtatcatcaggccgtcttacctgaacaagcaccgctttacgctcgaccggcacctatcttgcggatcccttcttacaaagcgggcgccgtccaagaggtcctcactaccggttcgttcccctcggtacccggcttgtcttatacctggtcggacgagtcgggcataagcgcggttggaggatcgacaggggccccgtcggcggggccgttaaaaatgaaggtaccgctgaggttacctagacctccgatcatggaggtacagcagcgatcgttgatgaggagcgaccccgacgtccaagaggtaagcacgacggatcccggtcgacatcgatcccgcttcaatcgtactcacaccgcaccgtctctttggacagtctctcgaagacgcccgatccaggttgaattacatctcccgtgacctattacgagccgctagcttgtaccgacctcgatatccggctactaccccgcctcactcggctgactctacagttcagtcatccagctctgcctcggaacacctcgcttccccttccagcctgtcgacaaccaagcaggacatcaactcatcaccctactctgctgcccctctcaccggttcatcctcgacgactaccagcaccgggacgatcgtcgacgggaccaactccccggacgggccgttcgacgtcatgttcgatcaaaccatcacgttcggtctaccctcggaagctgccgagattctggacggagaggatggcaaggggtggttcgacctggctgggtgtgagccggattgttgtctagcggtacgaagcaccaagagcaagcctgcggaatgttcggaggaggagggcaaggagtacacaggcaagctgttacccgctcagtgagtcggcggacacgggacatggttgtatcgattcgggctgacccttgttcgcgtctctttgcagtcacttgctatacgcctcgcaatgtgctcgtctccctcgccggcccggtcccccgctcgacccatccggattcggcctcccgctgaacgccgcctttcaccatgacccgaccgcgagcgacctccctccacttcgaacatcgatccaactccccctcgtacacctcaaggtgcccttcccctcccagttcaccgtcctacaccagtatctctacctgccggatcccgcgcgtctcctctcgacgctactggctctgcctccgcccatcgtccttcccggccaatcagcctccaagccaccggccgaacgcctcgcgacgctacccattcagaccatcgtcgaacggctcaagaacattcacaaaatgtggagcaacgtcgttcacctagggatcaaggaggacatgctctggaaggccatggaccgagcttggagcgtggtcatcgatgcgtgtcgcgctcggacaagggcgacggaaacgcaacaacgcctacgctcgcaggcgctaccacattatcaacaatacccgcagcaacaggtgtttcacgatagcgaacagcgatcccagcaggatggattcatcttaccatcccagccggtccaatcgatgatagaccctacgctggtcggaatcactcacgttccatcggggttttggaggatcccggcgcacctggtacacggcgatatcggaagcgcgggcgagtatatcacgggcttgcctgtcccgcctcttccgaaccatccaaagtcggcggggatcagatcgacagggcatgtcatgggactaccttctcacgatgaggagactggcttggcgtactagtagagagacggacaggctagaacggtcgacgcgatagcaaggcgcacggacgggggacgggttcgataacatcggtgatagataacgaacggaatgatcacacgaaacgacatggcatgtctctgtttatcatcgcgatctaatgaaattctgatattttgtataacgaacggttgatacatacttctggtcgccatcgctttcgtttttgtatgcttttttgaactgctgcgaaaatgagctctttcgggtggaatgacgcatacctttgacttttgatggggtgaaacgagattctcataagaaaatgattagcgatggtggacgtaaccggtagttaccttctttgtctgctttgtccctgtcggtattatcgtcatcgtgatcatcaatctcggtcgattgataacttcgtattgtcttcccgaacatggtattagggtatacgagagaaacggaatttctgacgattaaacatattcatcgtctagtaaagtcacacgactggacgtactccttgtgtaacacccgctatgaacatgtagatcgctacgaacagctaaatcagcgttcctagggagagagggatcggcgtgagaaagcggacctaaaagcgagatgcgaaaccgggctggtgtcagcccgcttcgccccccacaacaacacaacaacatcgacatacatctacacacctactactcttcactccactcattctttatcctgcattcaccatcactttattgcggcacataatcccttcattcataaaactcgtttgattctgtgtcatccttcgcgagcacgcacacacacacacacacacacacacacacacacacacacacacccggggggggggggggcgacgcgtaaaatgatgagaaatcgagggaaacttgacctccaccccagcctctagcccggcccctagcacgacacgtcgccctcctcgacaaatgtacatttcattgccttcattgattccccatccacaacaaccacctctctacgaccacagccaacccctgctaatcaagaagcagcccatcatggctccgtcaaggtacgttcgacccatccgacaattccgccctgatcacgggaaacaacccgcatgactgacgccatcatctaccggtacctcccttcgattcgtaacaggtccaagccgggcatcgtctcgccagagatcgaaaccatcacattgcacaaccctatcgctttcaccgctagagtttatgccgctcctttcctctgtaagccgtccgctccgttccccctcacctgacttgctatccgtcgaaactctctgctaactcgtctcttgaatcccgcacgcattctattcagccctgtaccctctgctctactttgcctactaccatcgatacgaccaatggatcaaatccgaagagtggactttcgtctactgcgtcctcctcggattcggacacgccctgacctttttgacgacgaggtggtcggtcgggatccggacgcggttggaaaacacccgggcggattccttggacacggcgacgagtatccgggtgatccccaagaaagacaagggcaagggggcgattgtcccgttggataggaagaaggaggacaggggggtcgtctattcgttcatttaccagagggatacttatgttctcgacggtgagtcgccccacgggggtttgagttttgaacgacgggacgaccggagggactgaccttgatgaggcgatgccgttgccattgccgtgggaacgacgaacagacaagacactcacctttacccaacttccttacccatgcgacgcctcgcccgacctggctacgttccaacaatcgccgggcctgctcacccgcccgacctcgtccaaacaacccaacctcccgctcgatcgatcggtggaccacctctctgcggagttcggggtcaacttgtgcgagatccccattcccaagttttccgaactgttcgcggaacatgccgttgccccgttcttcgtgttccagttgttctgcgtcgccctctggtgtctggacgagtactggaggttcagcttgttcaccggattcatgctcgtcgcgttcgaatgtaccaccgtcttccaagtgagtctccgagcgtgtcgcgccgcctagtaggtcgagctgacacgttgacccgctcgcaaacgcagcgtcttaaaactctgaccgagttcaggaccatgtccgttcaacccttccccctgaacgtgtaccgtgacaacaagtggtccgagatcacgaccgacttgctcctccctggcgatctcgtctcgatcacgcgtaccaagcccgactcgggaatcccgtgcgacctcttgttgttgaaaggcacggccattgtcaacgaggccatgttgtcaggagaatctaccccgctcttgaaggagagcgtcgagttgagggacgggacggacaagttggattacaacggggccgataggaacagcgtcttgtttagcgggaccaaggctttgcaagtcagccagcccgacggcggtgacgtgaccagtgagtgcggcggggagatcgtccgtccctctgtcagagatacacgccgctgaaacgggctcaatcatcgcccccctcgaaattagccccggatggtggatgtctcgccgtcgtcctcaagaccggattcggaaccacccagggtcaactcgtccgcaccatgatcttttccgacgaacgcatgtcggccaacaatctcgagtcgttcgtctttatcgggttcctcttgatctttgccatcgccgccagcgcgtacgtctggatcgagggcaggaaaaaggacatggacaaaggcaagttgttgctggacgtcgtgctcgtcttgacctcggtcgtcccgcctgaactgcccatggaattgacactcgccgtcaacgcttcgttggtcgcgctgagcaaattcggtgagcaatccccgtcgcaggcgcattcgtcctgcctcgatgctgacccctcccgcccctgcactgccaccggcttctagccatcttctgtaccgaacctttccgaataccgttcgccggcaaggtcgatgtctgttgtttcgacaagaccgggacgatcacgggggaagacctcgtcgtcgagggtgtcgccggtgtagatgccaaggaccccaagaagctcgtccccgtcaccgattgcggtaaagatacgatcctcacgctcgcttccgctcacgcgctcgtcctcttggacgacgggaccgtcgtcggagatcccatggaacgaaccacgctcgacgcgctcgactggaaactctccaagggagatcagatcggacccaagaacaaggaagccaagtttaccgctcagatcaatgtcaagagacggttccagttctcgtcggcgctcaagcgaatgtcgaccgtcgtccaagcctcggaaggaggtgggaagaagctcttggcaagcgtcaagggagctcccgagaccctcaagggcatgttcagcgagttgccacccaactatgacgacacgtacaagtactttaccaggcgcggatcgcgagtcttggccctcggtcacaaggtcatgaagacggatcctagcaaggtgagctcccgagcgttgccccgactttgacctgctcgtgactcatgccgacgggtactcctagatcaaggatttgcaccgtgacgacgtcgagagcgggttgacattcgatggcttcttggtgttccactgtcctctcaaacctgacgccgtcgagagtctcaagatgttggccgactcgtcgcaccgagtatgtcgtctggcaaggtgtgctgtcgagggttgtgtaaactgatagacatcgtctgcctcgaacagtgcgtcatgatcactggagataaccctttgaccgccgtgcacgtcgctcaagacgtcgaaattgtcgaccgggacgtcatgattctcgacttgaaggaaggtgctaccgaggaagaccgtgagctcgaaatcagctagacgacaaaggtggtggaactgttcgctcatatcctgcttggttcccttagaactcgtctggcgaaacgttaccgaaacacagatcattcctgtcgaccctagcaagccctttgacaaggcgatcctcagggattacgacatctgtatcactggcgccgccatgaaacagtacgagcacaagcctacctttatcgacctgattcagcatacctgggtctacgcccgtgtctcgccgcctcaaaaggaatacatcttgtcgaccatgaaggctctcggttacatcaccctgatggctggagacggtaccaatgatgtcggtgctttgaagcaagcccacgtcggtatcgccctgttgaacggttccgaggatgacctcaaaaagatcgccgaacatcaacgaaacgaacgattgaaaaaggtatacgagcagcaatgcaagatctctgccaggttcaaccagcctcctcctcctgttcctcctgctctcaaggccctttaccccgaactcgtcgagacccagcaggccgcacatgcatccatgacccaggccaggaagaagaaccccatggaaaaggtcggtcggcgacctcaacgcagcttgacgctcgcaagatactgacagaatgactctccacagttcgacctcgcttcgatcaccgacaagatggccgagatggacgacgagaacgagcctcccaagatcaagctcggagatgcctcttgcgccgctcctttcacatccaagttggccaatgtctctgccggtacgttgctggacgatcgcgaccggaaactgcgttcgatctgacaatccgcgtccgcagtcaccaacattatccgtcagggtcgatgcactttggttgctaccacccaaatgtttttgattctcggtctcaacgctctcatcactgcatactcgctcagtgtacaatatcttgatggaatcaagtttggagattaccaggtcactatcactggtattctgatgagcgtctgcttctactgcatctcgcgcgccaaggtcagtgcaaagcgtctcgataggatctcgactgctccgctgatgaatccgccttcccgagtagcccgttcaacaattgtctaaggagcgacctctgccctccatcttgaatctttacgtgctgttctcgatcttgctgcaattcgccattcacatggtgtcaatgatctacatgaccaacttggccaaggcgaaccatgagtgagtcctcatgtcgattgtgacgtgtcgagtttgcactgacacccttctcaatttcctcgcagccgaggcgtcgtcgacctcaaggccgagtacaagccctcattgctcaacaccgccgtctacctcttgggcttgtctcagcaagtgtcgacttttgtcatcaacttccagggtagacctttccgcgagggaatccgtgagaaccctcctctctactatggtcttgctggagtcagcgccatcgcctttgccggtgcgaccgagttctcgcccgagctcaacagctggttgcaattgttcaagatggagtcttgggtgcgttggcagcgagctcactcgcttctctggccgtctgctgacctagcctttggcctctatagttccgaacccaattgaccgtctcgatggtcctcgactttgccgcttgtttcgccgtccagcaaatcacgaaggccttgttttccaacacgaaccccaaggagattatcgctcgaggacaacctaggcgagaaaagaggcgactccagcaggcatctctgcagaccgccgaggccatcaagcaaaacggattgaagcccgacgaaaaggctggggccaccgagatgcctaaataccttcccaaggcctaggttcgaacacagttatacacagaaagcgcatggaatcgaccgtctcgagacgggagacgccgaggggtagccgcttgtacttttctcattcgtcgcattgattgacccctatcatagatatctgacaagcccgcgagctacgcctacttttccacttcaacaaacagtgcgtaatctcgtatccgcattttgttgctgctcgccgtgaaccaagctcggacctcgtccacctcggcctgcgtcttgttcgcgacgttgacattgacgctgcagagaacatccgcatacctccctcgagctttttgcccatccgtgtccatatcatcctcgtcgtcttcgtcatcggggatcggtcgtccgtctgcagatccgttctcgagaagcacccgccacaaagcgacaaagatgagcaccttgtcgggtggcggcaattcatcgaccgggcgttctgatcggaatttccgtacgagctgggtaccttcgagggtgatcggagagggagtggggaatttcgtagagaggtcttcgacggatgtatatgatcctagtggcactagcgtcgtcgtggtcgaaggccccgatgagatcacctgttgcgagattgcttcgttatcatgagctatagcttccaaatggaagctgtcactcccggatcagcgtggttgatgctgaaatcgatacgccggggactgtgctcacttgaccgctttccaaagatcctcctcgcatccatcttcctttacgacgtccaagatctcgacgactagggatacatcgccgtcctcggtagtatagacttcctgcgtatctggcacttgtcgaaagtcgctgttgacggtcatagtcaggtgctgtagctgcgttaggttcaagacaattatcggtcgctcacctgacgtctaggaaatcagcgggaacttcgagctcgatcgccccgccgaacagctcgcgcttttgcagtcttgtggatgagtaggtcatggttcttggggtaaaggttgattgggaaggaccgggcgtgtactgtgatggtggtcatgtcccgaccaagtttgaacaagaaggatatataaagatcttgaacctttaaacctgggtcgatgtctggttcacgtgtaatctctggtcaaaactcgagctcggcattcgtgctgtcgtcatcacagcgcggtcaacaacgaacgatcatctcccgtcatcatcatctcaacaagctagcatgcaagtacagtatacctgtggtcgtctacattaccgtcactcaatctcacacgcttgatagcaatataatcagaaggctcatcaccatggtcgacacgacccccatcttcttctggagagagattgacccgcaatggggctggctttcgcagtggtacgaatgcgagtttgagcacgaagggaccgtctacgtcacggccgagatgtggatgatgatccacaaggccaagctcttcaaggacgaggtaagactccacatctatcaccagcctgtcctatcaaaactgacctcgctttgcttgttctctcgactcggtaggaatccgttcaaaagatgctcaaaacgcgttcgccaaaggaacatcaagatctcggtcgtaaagtagcgaactatgacgggagattgtgggatcagcgtgagcattcccaaaatgcgtctggaatttgataaagcaggctaaacactcaggctgctgtacagacaaggagcatatcgtcgaaaaaggtaattatctcaagttcacaaagagcaaggacgaggatatgaagcgcaagctcctcgagaccaaagatcaagagctcgtcgaggttagccattctcccctgatcctcatatgatcctcttatcaaccactccttgacctcgtggcgaccgcaggcttccccgacggaccggatctggggcgtcgggtacggcgccgaggaggccgaagctaatcgaaagaactggggtcagaacttgttgggacgagcgatcaccagggcgaggatcaccatcaaggacgaggagaaggatctggatacgagcatgtctacttggattggctaggtcctgtaattgcaagggcgcgggtcggggttccggccgatcgagcgcgagtgctgttgattcggtgcacatgttgtaaggggaagccgggtgggaatccccgtgacttatatatgattgggcgatgggcccggatcggacgtggctcagcctttccgacaaaagtgttaacgatcagcgatacagagtccgagggtctcagccgcttatgaggtcggtttgttgccctgcattctcctttctctctatcttcctgaacttcgtggggcgttcgtcgtctgtgatgtgcctcgagtggttcccttagtgggccaagatgaaaccggttttgacaccggtcctcttgtcccggggccaatcttagaaggagtcgagggaacaccggtcttcttagggccatcaccaatcttggggccagtggacacggggttgccctggaggacagcggagtaagcggtgatagtggattcagtccgaagcacatgtaatggtctgacagtaaagcgcagggatgtcgcgctgatgtcggtctggaaatgacaataacgattcagagcttccttcacctagcacgctgccgccctcggcggatcgtcctgtgctccttcataatgatggccgatagcgtcggaacgtcttccagctctacgtctgcgcacggtacgggccagctcgtattcttccgggcagaatgcctttcagttctggctatctctacgagcccgcctttggcctcgcccctatctaatcgccatagtggcatgtctacgggcttgagtagccattcaccgagttttcgcgccgttcgtccgtaccattcaaccgctcgtccgtgtgtatgtaagcttgcgtcaggctaagctgccccctgactcagctccaggggcgacagactgcatctcgattcggtgtcgctgcgtgatacaatcggaacggacctccgttatgaaattagattaggtcttccaaccggatctcatctcctccgagcattgttgatcatactccaatgtgacacccatagccctcgagtaaggtctgcctgaaatcgctatcgtccggggcgatcgcaccgctacgcgacatgcgtagaagggaagcattcggctggtgggatgtcttcatcgtgaattcgagtcttcgtcctcggttcacccgtaagatgagcttcgagtgtgccagaaacgagtgttggtcatatggacgggactttttacgccgatattgtacactgtgcgcgtactccgtatatcgtgatgggtatgcactgacataacgcggaatcggaacatgactgcatcatgaaaaaatcgcagactgcgcaacgtcctggattagccaagtcgatacttctttcgtaaatgtgtgccacatctatgtaccgtttcccgttcgcgaccagcacacaaagacgctgacaaaaggacggacgagccacagcctttcgaacgccacatgcggaattttcaccatttgctgaagatttgaatcgcctttcgaacgatacacacagccgcctggcttccccttgagataggaatatagacggatgagcaattctgtccaagctgtggtaacaaggtgtcaaagtgacggatgactctacaataggtgaaacgcggcgtaatttccttttcacgtgatcacactcgctcgacgacttcgacctcgtccgtcgaacctcgttgagaccattcaagatgtttcgacacttgatcaatcgacgatgtgcccagacgagtttcaggggatagaacatctttacgtctcttctgtctgcgatgagttcgacattacgattctgccgtatggcggtccggggcatggcgacggccagcgaaggtgagtctcggtcattgctcttagctcgatccattcgctatatggaacaaagctaaccctgtcctccatctcactacagcctcgacctccaagacctccgcctacccctttagtgccgcggtcactttccccgttcgacaaacccctccgtcgtccactcccaccccgaaagacctgcttcacccgaagaatggcaaatccgtcgtcgaccacgtcaacgaacagcttctcgagacgtacgaccctgaacgactccgcaagaccttgttctcccgtcgacatcctctccgactgaaaccgggtagcgtggtctccgtggcttcgtacacggatatggggaaatcgacctcgaccgtcttctctggggtcttgctcggtatcgcacgcaagggtctcgacacgtcgtttacgctgaggaatatcgtcaaccggacaggagtcgagatgaagttcaaggtgtacagtccgatgatcgagaagatcgaggtcatcaaggaggccaacgggaaaggcttgaagttggccagacgggccaaggtcaactacctgagggacaagcctggtattatgaaccagatcgccgctgccgtaaagtcgaccaaggtgacgagcgacaaggcatgaggagggggtttaccgagttgaaacgactgggggggaatgacctgggagacgaggagggatgtgcggggcacgagcgactctgataggcgggagagagtcacgtttgtatacatgtcataagaaacgatcaaccaccaccaaacaagcgtcgtccaggacagaaaagccgtgaacaggacgtctagacgtgggagaaacaacggaggacgagcgaagcgaaaagtgaacagaaaggcggtgccgatggtgtcgcggttgcaggtcgagcttgcaagaggaagacttgaatcgcgttgagtggtgaacgagacatggaggaccaagagggaacgccgaggtcaggcgatcgtcctgctatccttgtcgttggaagcggcgtctcccatccacatcttgatcccctcgttgggcacgccttcgagcttgtctgccgtctgtgcgtcggggcgcgtaaaacgaggaggtgtcagcctcgaccggccacgcgagcggcctcgacctcgaccctcgacccacctctttcaactgttcgttggcccgtacgacctgattcttgatctcgtccatccgcttcttcttgccatcgacctctcccgccaatttctcgcaatccttgtacagctgtcaatcgaggcacgcggtgtgcatggtcaacggtcgtcctcccgaggcttggcgcgaggcacgctcacctgaatatattcttcccgaagtcgagtgtagacggcgtcatacctcggcaaattatacgccgctgtcaacgcctgtggagacaaatccggtctgtcgcatcccatccccgatcccgagcgtgtcagccaagtgagatccctaagtgacgtccagggaacacgggacgaggcggtacccagcccacgctaccgactcacctccacacgtccgagatgtagacgtcctgttctcccttcaagatgtcgtactttctcgtcctcgcttcggtgacggccttttccaatcgatcgagtgcgggttccgtgccgtaatgccgcatgatcccttccgcttggacctgctcgtgcgtgtgtgtatatgtgtgtggtgtgtgtgggtagtttcgttcgcgatagccgggatgtatcgcgggaatatcaaacggtgggagagaatatcctacggatcagctctctcgatccctatttcgaccagtgattccggcgggactggactagactgtcggactgacgatcatcttttccctcatctcgtcggccgcgcgtttccacaaccctttgaaactctcctttcggtctttacctgcggatagtgcagggtatgctttcatgagatctatcgcgctgtgggttcgaattcgagagtcgaggtccgggtcgatagcgagggtcaggttagttcgagatcgaggtcgagatcagttcgagatcgaaatcgaggtagtggaagacgaaagctctgaactgacctccatcggttggctcccgtacggacggccatatccagggctttctgtaacgaggcgtgatacgactctgaccgaccgtcttgcgccgcttgttcgtcatttatcgaatccctcgtcgtcccctgcagctgctcctgctggtgttcggtctcgcgaccatctactccgaaaacgtctaccccggcctgcgtatcgacgaccttgcctgaatcctgactcatagactctgccgtggctatccgtttacgcgcgggaggtcgatcttggtcatcgtcgtcatggtggtcgtcgtggttgttgttgttattgttggtgggtaccgtggtggatgaagacgggtcgagcgtctcggagctacgtttccggcgtgtagacggcccggcgatagggatcgaggtggattgtaggagaggatctgacatggtgcgatgtgtgatgtggaggaatggaactgagcgatactggttgagattgggatcatgttgctatgtatgtgtatgttgtttgaatatgctcgagttgcgagttgcgagttgcgagtttgttgacaatgtcaagcaccttggctcgggagacgacttggacaacgcgtgggaaacagggaagctagtcaggaagggaggggggtcacatcgttaccagggctacaactcgaactcgatcccatctcgacatctcaccacaggcctcccgtcatcactcgcctctacagcccgagctcacacaccgtcaatgatgtcacagaaacctctcacttcgaaaccccgtccggcgaccacgacgggcggtgccaaacctcgtaccaagttcagcccacgcgcaccggccagcaccccggacaggctcaagaagctccacgcaggcctggtcgatcagatcaacgagggctacttggagaacgctatcaagacgtgtaggaagagtgagtccctggcctcagctgcccccgctcggctcgggagcacgggatgggatacggcagacagatcgatctgacacgcttcgtcccgcgcttcaaacagtcctcgtgctggatcctcgatcgttgccggcgttcaagacgctcttgttcctcttgctgcagacggaccaataccctaccgctctcgcctcgttcgacgagtatggtcataccactgccggacccaccacggatgtttccgacccatcgacctcgttcgactttgaacgggcgtactgcttgtacaggttacataggggggaagaggcgctcaagatgatccaacagatggagagcgcgggttcggacgggatggggtacgagaccgaacgaggtcgtaaagtcggtcacctcaagggacagatcgtgagtccttcctccgggggcgtcctgcaccgatcgaccgatcgactaatccgatcgacatcctcccgctcgtccctcgtcccagttgtaccgtgcgggcaagtacgaatccgccgaagagacttacgatcacctcctttcgacctgtccctcggactcgcctgaatccggtgacatcctcgacaacctgaattccacccatactcacctcgaattccagcggaccgggttcatgtcccaactcccctcccaggtggacgtcgaagcgctcgagagggatacgcccgggggggttgatgtgctcctcgggcgatgggttcgggatcgggatagggttcctagggtggtcatcctcgataagatcaatggtatcgtcgataaagtgggaaaggaccccatcgtcgtcttcgtcgccgtcgtcaccggtctatcgatgtcgatcgtcgacaaagtcatgattgttgtgatgatgctcgcgtcctctattttcggcacatcattcatcctcgtcctaacttgtcccttgcaagacgggacgtgggggaggaggtgaccgtccgtgctccctctccgatctctatctcaatcctgacagtggaagatgcgggtttcgacaggtctatcctggtcgtctgttacgttgcaaacgtccaagatcgcgcagaggaaggcaaagccggatgaacgcgcgcgtgaagtagtcctttgttcttgatcgatatggtttgctcgtgagttgtttatgcggggagggaaagactagtttgatcttgtcaggcgaatgaggttaaacgagtgtgtgtgtgtgtagtgtgtatgtaggtttctctcgagtgaatggctttgtagtggtagtaagtagatgatggtatgtgatgatgatgatgatgtttgctgctgtgtttgttgatgcaccatctcgagtagcgagtaaagggaatgatgatggatgggaatctatttgaccatagacttgtagtgatcccatcgtgtctattaccttattaacgtcatgtcattacgtcatttgcgttatctctctgcccttcccacagtctcagctctctgcttctgtgattcccggttattcgaatcggcaacacacggggccaccacaagctagctaagctagggagctgggtgcctccctcaacatctacctacccaacatcatcgcccattgctaccataggatcacaccctaccagtccactacgatagccaggatacacagcagcaaccaatcacattcacaatcatgtcccaccgtaatcccaccgacgacccggaagatgaagacttggacgatctggacggtgagttcccccccttctcaccttctctctacgtcacatcccgtttacctcgtcgacatcgacctgacgctgataaattcatccatcatcaaacctcctctcacaaacccaacccctcccttcaatgccctcgtcgaatcgatccgatccctgtctttgacgaacgcacgatcccggaccccgcagacatcttgcctacgttcaccaaacccatcccatccagctccaaaccctccttcgaccccagctcgacctcgaacgaccttcccaattccggttccaattccaagccaaactccctccattccgctcgagtgcaagatggtcacgacgacgacaacgacgtcgtcgacgacagagctgctccgggtgaggaggaggaagatcccgaattcgaagcagagctcgccaagggtatggaatccctcttacgagagctcgggatgggcgggtcgagtgcgggtacggggaagacgggtaggggtgatggtggtgatggtgatggagatggcgatggtgatggtgatggaagttcctcaacgggtacggggtcggggtcgaatgccatggacgcagcgcaagggtcggaagaggtgcaaatgcaacgattgttggattcgctcttatccggcaagatggatgacctggatttgagcgcctttggattaccttcgaatcccggtcaagctggacttggagcgtcgtcctcggcgggaatgagggggaacggagaggtcccaaagacatcgtcatccaagcccacgccgacgaccaaacccggctcgaaatcgatgatgggtcagggatcgaccgaggggttgtctttcgaggagacgatcgagcggacgatgaggaatatgaaggaaggtgcggatgatgccaagaagagcaaggtgagtccgcccgtcctccctttcttctctctagtccccccccctgtgcggcaaaccctacccgaaatctcgatctcgatcggctgatccggagccccgatacgcggtttgtcgcctttcctcgcccatcagcccgcagcgcaagaccccctcatggccctcctcgcgcaactcacctcggacccgaacgccctgaaagacctagacctggacgggctagacctctctgctctcggcctggatggcgacctcggaggagcgggcggggacgagggtgagatgggaggtgtactggatggcatgatgcgagggttgatgaccaaggagatcttgatggagccattggaggaactagcggaaaaggtcagtgtggcgtgggttccgctcgaacgcgaagtaatggtggcaagacctcgctgacctggacgtcattgattcgacgtacagtacccaccctacttgaaagcccaaaagacccacccgacgatccctgcgacacagctagaaaattaccagacgcaatcccggatcatcgacgatatcctgcgtctcttccgctcgcctgggtactcggatgaggacgaggacaaacggaaagaggtgtacggcctcatgtgcaagatgcaggagatgggcagtccgccggaagaagtcatgggcgagatgccagaggggttggtgagtccggcgtatggtcattattcgacttcgacccggggaccacaacgggtcagagaggcagatcattgttgctgatcccgtgacattcgcgtaccgactggttgggtctacagggatttggggacgaggcgtgtacgatcatgtagaggcgaggcggggcgagaccaagtcccttggagcgctcgagttcacgtcaaagttgtatgcatggcagtctttccgggatttcgcagggcttttcgtgtgcatttcatcattgaccataccatcatgcatcagaggttgaaagggaaactttaggtggtctcgtacgtcgtggtggggtattcgaccagcagtgcacgaccatcggcattagggcgtcgagggtggcttcgcacgggactgcgggctcctctatcgctcaggaggctgaaattgggattcccggtaacagaccgcaccgccgtcgtactcgctccgctctgccgggtcctccaaacaccccggtcttgtcaaagtggacgctgtacaattgtcaagaatgggaagacgtttatccgtcgagacgaatcgggctgtatcatcggtgacgggcgaggcagtgctgtagtctttgttgtatgtgtacagtcgagatcaacaacggtcaacgagtggaatcaaagtgctgaaaccgatactgatatggcgcgctagtttgaaattacgagaaaatgacgagagagaccagggagagctcgagagacatggcaatggtcgaggacaggatcatgttcacagagtattttgaacggtgtgaaagtcgtaacctgctctgatgcatcttcaatctcacgtcgatacacctacacctccacatctacgggagaaaacacctagcaacgatctagaaccaacacatacatgatgacctcggtagctcagccgaccaacacgccgtcccaatcggcacccaccccgctcgacccagccgtcgaggccgcagcattcaagcgattgtatcctcggaaatacctgtcccgtttcctagagcacgatcgacggccagatgggagacctacggatagctggagagaggtcgggttgaacgcaggtgagcttttcggatcttggaaggaaccatgctctcgatgcatggctgacccggaccgatgtcattcaggtgccgtatcgacagcgaatggatcagctttaatcaggttgggggatacgacggtggtctgtggaatcaaggccgagacggcagagcctgactgggatcgaccgaacgagggatggttgggtgagtcttcatacccagcgatgcgtatctagcgtcagacgagaccgctctcttctgactcgacatcgattttcatggagacagtaccgaacgtcgacctccctgccatttcatcgccaaacttcaagcccggtccaccggccgacgaagcccaagtgttttctcaacagatttacgacctcctcatctcgtcagtcggcatcccctcgcccgccctcctcgcttggccctaacatatgtgttctgatgacgttgccaacgaacgacagatcaaacgtcttgccattgaagaaactcggaatccgaccagggaagtccgcctgggtcttgtacatcgacattgtctgcatcaattacgacgggaacgcgtttgacgccgccgtgctggcggtcatgacggctttgcggaatagtgagtcctttacctctcatgccgtgtggttgccgtcgatcggagcagcggcatggatcattgctgatgcctttttttggaatgactgtgatagcggtcttgcctgtggcaacatacgacgaggactcggagcagacgatatgttcgaggacagagacgaagagtttgaaggaagatctgaggagtatacctctggcttgcacgtttggcgtctttgacaagtgagtcgaacgaaccgatcgaccggttaccgagctcgatcccatgacatgacaggtagctgaccatcctccccgatgatacccagtaaatacctcctccctgatccgtccgcgtttgaactcccgctctgtcccacgagcatcaccatcgcgctggacaccgtcgaccctcgatcccggtcaggcgagaccgtcgagcccaagatcaggctggtcaggcaagagggattaggcgggtacgcgggcaagacagggatcgaggtcctaggcgagtgtatcggggcggccaaggcgagggtgagagagttgagcgggcaattgtatggttcgtaggggtcggctgtagggagagatcgggcgcgaacggacggatgacatataatgatacatgcggtggagattacaaagtcgcttgatcgcacgacaggtagagttgtgagagcattattatcgtcgtcaagatatggtgtgcagggtcggtcgtcccagaggtgcatatgacctgtttacaactacttgaatcgatgatgatggtcgatcggaaacagaaaagtggaggtcatccagccccagatgcaccgttcagtcatacgtgacccagagcttatagctttgagctgcatataccttcacacattctccgagccttgtcaaacccagtagtgtcgccagtcgattgatctcgactcgtagtgtgaccaccatgtcagccaagatatcgtttccctccaagtccaacgcttttacggcggtcaagacgacctcggcgaggcgggatagcatacaaccgggtatcgatcagaacggtgccaagcggatcaaactgtcgttcccctgtaagactctgcggcagaggtccgactcggtttggaaatactcatcaacttgaattcattcccttgtttctgctaatgccatgatgcatgcgcagctggtcccgctcgatccgctttcgatccggatcaagctgtcaagacgttgaccgatgcgttccccgtcatcctgtccgacaagcaattacccgcagggcagaccctcgattccctgttcaggacatgccagaaactcgtcgctatccccaccaagccgacccaagccgccttggccgggacgcaaaaggtcgccagggcgatctacgacgaggctgtctcccagctcgagcagagcgtgagcgtcgtcgggaaagacctccgatcctccgtcctcgctggaggggagacgaccaagggtaccaacttcctccggctcgtactcgacagatgggctcggtgggagatctgctcgatcaggttgatctcgatcctgctgcacctcgatcggacgtttgtcctccagaccgacggtctcgatacactccgatcggtcgcgctcaagtcgttcagaaaggcagtactggaagagaagattgtacaggaaaggtgcttgcaagcgatcgtcgggtggatcgatggggatcgcagaaagcacgactcgagcccgtaagtcctggttgcgttttcgacagacacgtggtatagagatattctcactgaagacccgtcggcgatgctggatttctagggatgagaccgcaggaccgttatccgagctggatcagatcgaccggaacgtcgtccgcacatttatcgcctttgccaaccagctcgacgcttccgaacctatcatcgctgcttatcttcaatcaagcaccgagtactacacccaagctgtagctgaacgagctcctggtggcaagccggaactaggtgacaagccgtacaccaggtacatcgactgggtcacggaaaggggccaacaagaacaatatcgctgtctcgacatctttagcgaccagacgttgccaaccggggccgtcgtcatgggaaacaaggaggacgcctggaagttgatcagaaatgcgctacgagcgactctggtcaagggttccattgtcgggatgacgcagtcaggtgagtgagggcagcacggagtgccaccgaggttctcacgattgaaactcttctcgtcctgccttgaaagcccttgacgaggcaatgtatgcatccgacgccaagaccttgcaaaagctctacgtcctgctcgacagtgatggcgcctacaaagagttccgaaaggcgctcgctcagcacgtcagggagagagcgaccaaactcatctcggacccggccaatgataccaagatggtagcaaccttgctagaattcaagcggttctgcgagaccacggtcgtcgcgctttgttcgtcggcaccgagcacgctgcgtgatgatgatcagctggctggacctagtaaccgcgagaccaagaggaagaatgccctcgagaccgaggtccgagatgggatcaaggcgggagtcgagacgcgtcaagcgactccggccgagctcatcggtgggtgtcgaaagatgaggggtgaggcttcgttacgaacgacgtggactaacgcacacgctcaaactcgcagcaaagcatctcgaccagaccatgcgaaagggtcaagggtcgatgtcggccgaagcgtttgagaaggtcctggatgacatcgtcgacctggtcaagtttaccaaagacaaggacgtattcaaagagttttacattacccagctggccaaaagactgttgctcgcgaggagcgctagtacggaggaagaaatcaacatggtcaaaaagctacagaacggtaagtaaacccgagttctagcggatcaccgcgaaccgtgttgctcaccttggtacttcaaagaatacggcgaggaattcacgacgggtgatgcaatgatgaaggatctttctcagtcggaagagcaagtccatatcgcacttgcctcggggcttatcaaactgacaatattcctattatgcagcatgaacaagaagtaccaagagctccgcatgtcgaccgggaaggaggctaccaacctgaccgttaatgtcctgtctcaaggtcaatggcctccgtaagtgacctcgttgtgtgtctaccgcctgacggtcaataccgattgtcgatgcaattcgaacaggtacaagccactgggcaagggctgggaacactttacgttgctgccgagcgtgagtagccaggatcgatttgcgagagcaacggttccattattttgcgacccactgattggaaaaaatcacgtagatgcaaagagaactcgacggtttcgaggcttggtataagcatactttctctggccgtgtcctctcatggcgtcatcaacatacgtccgtgacgatgacagccaggttccctggaggcaacaaggagatcggggtcagcctgttccaagctatggtgttgttgcaattcaacgacgccgacacgctagactttgaagagctggtcgctcgaaccggcattggtaagattcgcgattgtgctcgtcaactcacaaggtaaatagatgttcgacgctaactcgcggtactcctacgcagaacgagacgagttggtgcgtacacttcagtcgctctatgccctcaaggtcacacgagtattggtcaagcggccgcctggaaaagacgtcaatccgacggacacgttcacctggaattccggtttcacccgggacaaggttcggttcaaaatcaaccagcttcagcaggatctctcggtatgtaccgccgtccagtcctcgcggatttgtcctcggaaagtatgaagattctaatattcgctttgcaggccgaggaaagcaagcagacgagcgaaaaggtgtttgaagatcgtaacctgactctggacgcgcagatcgttcgaatcatgaagagcaagaagcagatgaagctacaggatttgatcaacgaggtcattgacgctgtcaagaagctgtttcatccagaggttaaagcgatcaagacgcaggtggacagtctgatcgagagagaggtgagtgtgggtatgcgcgtggttcgccaacttgattttcatgttaccttttctgcagtacatcgaacgaaacgaggaccatcgggacgtgcttacttatttggcgtagtgtggtacggtcgagcgtgcggcccatgccgcgatgttccgatgtatatatgtccaggtgccatgtgtcttgtcgagctggatattttgataccttctggtactgcgctttcgggtaaaactacatgatcccacaatattgatgttaagattcccatatcttgcagcccaaagcagcaaactcatcaaagcttcgagccccatgtgtagatccgccgtcctctgattgggcgggacactactgcgccaacagttcaaaattgtgtttgcgaatcggtcataccggcgagtctcatcactgccgtcagatgaaccacattgagcaatccgtcatcgcggagatccggtgacagaccggccagatgtagaaggactgcggaagggtggtcgataccgtgagaagggattgattgtgtatgttgcattgcaggatcaaacgttttcttttgcgggaagctcagctcgagaacggcatccatcacgccaggtaccaatggcatccggaatgcgctcggaaatgtgtctgcagacgtgctcgaatatctcagctcagacaattgaaatatggaagcatcgcgaccatatttatcgccgatccagcaaagtctcagagctaccgccatttgtgccctctcggaatgatggcgaagatttccagtactatcagggagacacctgactcatccctaccgatcgacccgtgacggatataggcattcaaagtaaagtgttgaacctcatgcttgaccgcaaggttgttgccactggttggcagctgataagctctgtcgaaccattggcgtaccgaacatcgaggcgacgaccgtgactactccgtcactcatccaggcgatattggaagagaatggccgctatcgcaggctcatctacaaaagtacaaacgtcgctctttctcctcacaaagctagcgcgtggcagacctacggatgatgctcacttcgcgcgccctgccgctcatcattgcgagatctggatttctgattgttcgggggtggcggtgaaacgcaccatcgctcgaacctgcaagcagagtgtggggctacggtattcggtcaagcggatcgtgcagagcggcgggggcggtgagattctccgccgggttgaacgccctgagcaggtgcttttcaccgcgacttccctggtcctggcaccgagctctgacctttgtaataagcgtctgtgcgggttctgaactacttccctgttttctgcgataattgcagtaaccatgattcagatctacgattccagcgccaaatcgccaaaagcacgcccagagatcgcgtgacgagacgtcatgcgtcgactcggacgtcgcatattttgggttcgaaatcgattatcatctcagcaccctcattccccgtcgtcgcaatccaagcaaatacatctcatctctacactctcattcgacccgtcgtgaatggtcccccgggggttttgcacccggggacggcgagcctcgttccgagcaaaggtatggtgcgtttaccagttctgggcgggctggtcggcggaccagtcaccggcagtgttgtcggcggaccagtcgagggctatagtcgcgagagagagagaaaggtaatcagcacacggcacggacgtgagcttatcggtcgggtcctcgttttcgactcaccctgaccagtaggctcggcagcgaactgagcgggctcggcggcgttggtagcatcccactcggaggggacggcaccctcgacggtaccctcgacagcggcgtttccggcaatggcggcagcggccttctcggcgttgtcggcctcgacctgatcggggtcacggtagaagaagagatcggggaggaccgaccacgcgcctcggtcgatggtgcctcggagacggaggacctctcggcaaagcaagtaccagatctgcatagtggattcaaggtcagtgtgacccgggttcatcttgaccgaatcgcgagccagcgactcacgagaccgatcgagtgtcgcgacttgttgttgcaggggatggcaacgtcgacaaacttcaacgaagcgtcagtgtcacagagggcaatgacgctgatggccggaatgagttgttggtgtcagctcgaatccttgacaaatggcttctgatggcactcacgggatgttgacgtaggcggcctccctgatggcctggtggtcgacacgggggtcggtgacgatgatcaaacggggctccttgaacgatcgggtgatgtagttggtgaaagaaccgggggtgctgacaaggtcgtgcaaggtggtcagcaacgttacaggcaagcgcaactcataaacggaaagaaaactcacaatcggccggcaatggcagtagcaccggtgaatccagcgtacttcaagacggctcggtgaccgtacggacgagcactgatcacacagacgtcggcggggttctcgatggtagcgagcactcgggcagccaagacgatcttgttgtaggtcttgccgatgtcgatcaagttgattcctggggacatggaaggcatctcacgtcagtcaataggaacgcaggcttcgctctttctttcggctagcgggcgtgcgggcaggatgttggcgatcgcaaggagtagctatttgatccggttgatacgctggagacctgacccagagggggtgtcaagccttttccacctcccaaaccaacttccgaatctcggctgcaatcacttccagatcgagtacgcttcgctagtccaacccttctctgcttgatgaaccgaaatgctccttgttccaactatgccatgccagacccgtccgattgtctttgctgtcccgtacccgacccgccgccgcccgcctcctaacccatccgtcaactcaccgtcggacctcttcttgtagacgtagttctccatgtctacgtttacgtttttacctccaaggtggactccagcggagagcatcaaagccgcatcttcggcagtgaggttgagcacatccgggacggtagtagagctagacatgattgctgttggggtggggaaaaggccttttgcgtcctagaaagcagcgcagagaaacagagtctaagttgaagattctagtcttggagtatgtgagaaagagacccactttttgcacgtcgagaaaagaggggaaagggagcgtatgaaccgatggatacggctgaggacttgttcagatcacccaagttgagatcgaagggggacggcgctggtcgggagagagacggagagggagagggaggaggtggttgtgcgtgtgtgggaacgagaacgaaagaggaacaaacaaggtttgaatcaaaatgaatattcattttatttccgcgcgagagagccaaacaagagtctgtggtagggatgctaacgggtaacggggaggctgggctaggctgggttgacgtgcaaagatacgcgacgccttcggagttaagaaaacaacagaaaccagctagaggcgcgtgacctctagtagcctcctgcaatcctacccgagcagcggacaagtgttcgaatcaacagtctcgtacgattgaatgaccagtcgcgatgatcaccatctcatacaggtctacctcacaggggtaggtataccgcgagcgaaatagatacgaaaggtgtggtcaggtcgtatggcatcctaaaatcattctcgtcacgtagagcttctccgtaggcatttcaatcggcttgacacgcaagtaatggtcgtaaacattgtatgacggtacgaaccacaagtctgcggaacaactacacgtacaaaagatactgcgtctggatagacccggagatcggtagagcgaaacacaagttcagatcctctcgacccgatgtgaatcagccatttacttccgcaccactgattccctacgaggtattttcatccgggattcaatcgcgtatgttcgtttaaccgcggcggtagcctcgacctgtaggcatgtatgtatgatcgtatgagcgtcgtgtgtgtgtgtgtgtgtgtgtgtgtgtgtgtgtgtgtgtgtgtgtgtgtgtgtgtgtgtgtgtgtgtgtgtgtgtgtgtgtgtgtggtcccgtcgatcatccatccattcctctactttgatcatcctcgattttcgcgttcacccaaacgtttcgtctttacgttgcacttgccgtcgtaacgagtggcttgcgatagagtgaacacttcgagacacacgaggatacgagccgctgccttgaagacgaacggggcagggagaaaccgtcgggacccacctctgtgcgcaaaagtcacccgcggctgagagaggatctggctggtaggacgaaaaaggcgattttcacacgatccccgatacccgaagcccggctagcaatcgagacgatcaaccaacccccgacccgccctcgcatcaaatcaacctcggacattgggctcgacacgaggttttattacacgaatcgtttcgacatttttggacccaacgacgacgatacattcgacgatccggtccgaccaggtgttgttgatcagccagcaaaaagtcggagacgggggtgacgccctcttctctgccctgccctcgtgcttgttcgaggtggacgatcgtcaccggctcgagcagccagcgagaagcgatagaagggtcttttagtggacgttgagcggcgggatcaaaacaacaatcacccagagcctacctttgcctctcccgccttggtggtcgcccagggtctctctttcatccgccttcccctttgcctcgcgccacgccacgagcttctccctctggttgccgcgcgatcaaagccggcgcggcgcgtgctcgaccgaacggcaaacgacgaagaacgagggccgaagcttccagcgagagcgcagagaccgaacctacctcgcctctccctgctttgcctcctctcgcgcgctcactctcttccctcttcctccctctgtctctctcttccaccgcctttctcctcctcctctcgctctcgctctccctctggaccagatcccgatctttctcaacctcttcgacaatcccctcttcacctaattcgcaaccatgtacgaccctatcaaggattgcgacaccgacacaaaccctcggacgagtagtcattacaggccaccacctcgtcactatctcagtggtcgtgagacggcgacgtcgacgccgtacctgcctcccccgatggaccaccggtaccctgcttacctaccgccgtccgactatccttcttcccgaggcccgtcgtactctcaccaaatttcaccgccacagagttatcctcaatcatccacgtctcatcaacgtcagacatacgacgatagtcccggcagacgatcgtccccccagtcgtcgacctcgccggccctccactcgcacggcgcaggaggcatcgcaggtgacggttcttccccacacggaccgagcagctcgtccgctctcgctgcctccctcaagcctactctgaaacgcaaccaggcgtgcctacaatgtcgtcgtcgcaagctcaaatgcgacgccgctagacctcattgcaagacctgcgtgagatcttacaaccacgctctccgcggggccgatgcgagcaggagggaacgcatcagggaacgtcagagagaaagaggagaagaagagcgggatgatgccggggacgataatgacgaggaacctccggcagaatctctcatcccggccttgtcctgcacttatgaggatcctaccgagatccaggccaagcggcaagaatcagccgccttgacgcaaaaacgttacggtcaacagattggcgcggccaggatcctcgtcgagggtctcgccggtgggagcggtctcgtcagggttgacagctcaggagatgaggtctgggagacggcgagacatccaggagcgagaaagcgaagcgtcggtagtctgatgggaggacggaacgggacgcccgagtacggcaggccgggcaagcggagggataccagtcagacgcacgaacagcgtaatgggagggataggtcggatcacgccgagtcctctgcgggcggacaggcggcggcctttatcgatccgggtctcctgggcgagacggtcgggtacggtcagacctcgccaggcagcagttctcgacgtccgccttcatcgcttcctctcgacctgggataccatccgggtgggtacggaaatcagcatcctatcgcaccaccaccaccgccaccaccactgcagcctcctgcaggttactcttaccatcattcggcgtcgggaaacgggatgggaccccttgctcaactacctcccggtcgtggaccgccatgggaatcgaatcacatgcctccctctttaaaccgggcctatgacgggtatacgtcctcttacgatcgatccggaatcaagcaacaagatccgatgccgaatttccagggaccagcgcacaattacttcgctcccggtcccccccctcacatgttggacggtcttaatccgcctcgatctaacggtctcccgttccccgagcctctcttgccgccaccgctctcgtacggacctccagagagctcggcccgcgagtctctgaggagggaatcggtgacacccctgccccacatgaacggacagaacggggcgctcaacggatcgtccgtcatggcgtccgcacaaccgcgcatgtcggcatatccggacgacgccaatagtggcggacagttcagcgctcccgagcgtgttcaaaatgggatgccggcgtttgatgtcgcccagctagacccacgtctcggtcagaaagcgagggatgatcccggatgggaagcgacgcgtgggtcggtatcggacgtgatgcctagaaaagcagatagaggtgaagccgaagaaaacgctcagttgaggagcaagatcggtgagttgtaatagctttttcaacccgacccgatccctctctacgtataacatgtgtgaaaagatctgcatgtcccgtttgattcgattctgaccgatgtggggatttcgtatttatctacgtacgtgcacagcctggttggaagcagagttgagacagaacaacgttcagcagccgcctcaaggtgcccctagttctatctcggtcgatccgagatccccggggagccatctcggcagcgcgaccgccgtttcgaacggtcgatcccagacgggaggtcctgaggatggtaatatgttggccctgctctcccaggccatcgatcagtccgggtatgaacccgtgtcagcctctgcgcatgcgaatggacagcggaagacaaataatgtttcgacgtttcgcggatctaccaccccgttgaagcccaagacgatctttgagatcgcccctgccgaatcttgggcggcgacgatcgattcgagtcgggcgcgaacgcttgcaaacattttaaatgagacaaccgacgtggacatgggcgacgtcaagccgttcgagatgccagaatcgggaatgccagagatcgtcagcggcgaagatatgcagaagtcagcggccgagccagtactgtgggatctcttgtggccgggttggaacaagaatcttcccaacccagaactcatggatcatatgtacgtcttgcccccatgtcggatcgcgccgttagctaacgatcttcacctaacctcgcagcatcgaagtctttttccatcatgtgccaacagtgacacgtctgttccactacgagacattcaaggcgaggatggctttacctgctacgcacaaggatttccccaacgtggcggtcctacacggtatatgtgcagccgcagccaggtacaccgctcgagtcttcacgtgcaatccggaggatgagccttggttacgagcgggagagcacatggaagacccccgtcgtgaagaggactttggtatccgacactcgctcctcgcctggcaggtgatcaatatgcaactcaaccttggcgtgcatatctacgagagcgcacagtccctgatcctcctcgctaatcaccaccacatgtatgcaagatgggccgaagggtggctgtgtatcggattggctgctcgacttatgccgccgctaggtctgagcgtcaaagagcgagccaatgccggcactggtccgggagggcgaggtccgtttttacccctgtctctgaacggtatagagagggaggagcggagggcactcttttgggcatccgtgctctatgacatccagatcagtgctagttcgggatgggctgggatcatccagcaggacgaggtcgtaagtcataccttccacttcttcaaatcggctctgttcgcatgtctgatcttttggttctatctgcagtttgtgccattacctgctagccttgaagcgtttgaggccggggtgtcagcagaggtgccagaaagcgatcaaacgctgcatagcccggatatatggtccaggtcagtcagctcgccttgctggctgcgtcgatatcacatgctgatcacaaaacccattcccaggcatcctgctcgcgatggtttcgtgttccacgtcaaggcgatgtgtcttttccatcgagtgactaaattcgtgcgaattctcaaggccaaacgggccatgggcggtgcagaggtcgatgttagggcttccaaggagttccaagatcttgacgcttcgatcgcgaccttcttgtaagcctgatggacttcgactccgcagtaaagctatcaactgaatcggctacgctcaataggaattcattcccgtcggacttgcgtgatcctctgaccccttgtagcggcaagatcaagaagccgatagatgtggatctatttgtgagtccgtttgagaccacaattatgtcccctcttctctgattcactgcttcgttcacgacgatcttttccatccagactgcccaagttgtatgttctgcgtcggaatgtctacaacctgacgccatactgacgtcgatatacttttctgcgtgataggtcttgcaccaaatgaccatcttcctccatgaacccttcgccaatctcgatatccccgacgatccttctaaccaacgcttgttggaagcttcccgaagtattctcaagatgatatttgcaatcacttcgacctgcctcgatctgtcgttgatctcacgggcggactttggtctgcacacggctgcacggaccttggtactcttccttcgccatgcggtgcgcacgggcgatacttcggccgggactgaagaacaattgaggagcgaagtggaagtgttccggctggctttcattgcccatggcaaaaggtgagcgccaggttaccgtttccaggcctagaatggacaaagctcatatctcgtacgcaggtttcctatcggcctccgtcacagtaaagtactcggtgcgatgcttgccgactgtggcccagatcgaccatgcgcatccgcgaaacagctggccattgaaagcgcatctgtgcgtagtccttcggacacgaaaccgaactctgataaccctgaagcgaccgaccaagaggccgggaacggggtcatcacgccggcggcgaactcgacatccatgccgcctgcgtcaacgaagtccgagtctatccctctcaaatccccttcggtcgccactgtcacaccggtgatcaatgggctcccgcaaaatggtcatccggtcaaattcgaaactgtcgccctagtcgacacccgactcgaaccgtcagagagcgccaaacttgccgatcaacacgagctgaatgcagtggcgcacaagcaggctgtaccaccagcgtcagcggtccaggcgtaggctatctgacaagcatgcatgatcacatacacgtcagaccaaggttgtgttatccaaatcattcaataccttgtatcctcaacaccccatgtagccaggctcacgcaatccatcgacgcataacgaactgtctttgcagtcttttcctgatcttccgtcattgctgagagctgaacacggctctccgagaaacgtctggtattcgactgcgactcgatttatgcgaattggcgtgtttcgacttgtgtttgcgtttcgacgcggctgcgaccgatgacatacattgagctgcgaggtcgacagatcagatcatcagcagcaggcaacaggagatgctgtcaacggtttcaggaggattcgctgtcttattcgtcgtctccctcaacgtggcggtatcctctagctgtacgccctcgagaaggagtcccacgatacaactaggttgtcgaggttaccagaaacaacgaggcaggaatcatcgacatcgtaaatgcgattcataaggcgcctgatgagacaataggagtctactaccagtcaagggatacacctacgacaatacagatcggcatccggcttcagtatcgaacggatgtatgcatctacagggcctcctcggccacctgggagttggcaacaacaaccgaatcgaccagccggaccttcgacgatgcctggtggatttgccttggccgacatcaagcctggcgagaggatgccattgcacatggggacatcacgaccaccaaacggcatcatgtcaggatctatacaacccggacaagtctttcgccatccaggatacaacgctcctgctggcaatgccattcccggaccgggccctagatcggcgtcgaacccaaatcgcccgctgatgatgggccagatgggccctcctttgcagccaggtcacacctccggtccgtatcgacctgtactagccccaggaggaggaccctatccagtcattcggcctacaaatccaggttatgcaagttccaacggggcaagctctgggcccatgcctcaaccccgctctgtcacggccccactacagtccagagcgccaggacctcagcgttacgaactgcatgatcgggtctcgtcacactcgtcgagatcttccgcatcggagaacaatcgttacatcacacggtctgatggatcaccacctctgccctttccctcagactctcgttcaacctctaccagaacgcctcccccagccgaagattcccgtttcggaggaaggtcggactcttcggcaggggctcgaggattcacacaaggcggcagaagcgacagcgtttcgtcttcttctgtaggagcaaacgggattggagtgagcgcaaatggcagttcagggggcaggaaccctctcgcggagttgatggagagcgagaagctgtttgtcgagcgattgggcctggtcgtcagggttagccctggacttacatatttccgaagtctagaccaggtatactgaaatactcaccttttgacatctatttgacagaaagtggcggcagcttggtctcgatcgaatctgcctccacctgctttggataagatgtttagagcggtcgagggggtttacaagtgcagtcgcagcttcgtctcggtgagccactggttcccggaagggtcacatgtttggagctgaacgacgatttatccatagcggctggaagagatcggatcggcatctagctcacccaaagccataggcgacctcctaattcaatgggcaagcacgagacaggcctccgtgcgactggaaggactgtactgataggactgccgcttctacagattgacgacctctcttccccctatgaacgctatgccgataacctcatggtcaacttcaactcccacccggcgatccttagcaaccctaatctctcccggattctgtccgaactgacattgtctcatcctccacctatgaccacgtctgtgccaacgtcttccctgaatcagacaaatcctccttggacgatagatcttttcttcgtcctaccgctcgaccgacttcaatattaccgcaagctctacgacaagcttttaaagagtactcgggagggcaagagcgactggaagctgcttaaaaggagctgcgagaggctcgaggtgctcgttgaaggggtcgaggaacgtttgagctacgacgtgaacaacccgctatcccgagctggttcgagcaacggattagacagcaggacgtccgtggcgacatcaatggctgccagctcggtggaaaatcacacgtgagtcgtatgtcattggctttgccctgattaccctgctcactttccaatatttttgcctggtgtcagattctcttcgtctaccggatcttacccgtcaccaccacagtactcgtctgcttcggatcagcattcgtctcatacgagtctcatcgaaaagccgccaatatcggcaacaatccaaaagtcgatcaggtccctgacgcctgttgaaagaccgggtcaagcgccgctgaccgatctagaggttcggcttgataccagtcgtgcgatcgatctgtttaccatgcggcccaaagtaagatgactatcgcagcaaacctcgaagacttaccgctgatatggccttcaacgtcggtcagcaatgccgcttacaaatcgcccctcccacactcgccttccagcgcgaacagaggaaagcggtcgactgcgtcatctcttttacgccgagctcgacacgtcaggaggtcattcatcaacgcgctcagatcatcatactaagtgacttgttcctgatgtgcgagcatatgacggcaagcgaaaaggcttcgatagtacaagaggtattatccaagtatcccgaacgagcgggggacggatctccgtttccagaaatgtggctatgctatcctccgctggcgggccgacatctcagcgtggtcacgggaggtctggagaccgagttggtcgtcgcggtcatgggcaaggagagatttctcctggagtttgaatcacgagaagtgcgggacgaggtattggacgacctgcaggcctgcattggtttcgcatctcaaggtcagtcggccagtagcacgacgtgtacctcaatctttaaatgaccgaatatgatgctttttagtcaacaagccacctcaatctcgcagcaaaccaccttctccaagaccggaccgtcacatgccagctatggacgctgaccgtggattgtcggtccggtctctggatgctgcccttccatctggaccatcgactcagaatctgtcccagcacaggccgcggatagacacaggtcaagccaatcagatggcgcctccccctcgtaatgccagcctgcgctcacccggattggatgcacccggatctcgcccttttgctgcagatccgcatagaacgggtcattacaccccttcacctcccctgccttacaatccgggacagttgatggattcgacccagtatctgccagtcaatccgcatcatcacggctcagctccacctccccgttcggcaccgatcttcgaacacaacggagcaccgacgatgggcatgcctcatccatcccggtctcacgacggtcactcgaggatgcacacgccagatgacccgggtcagcaacaatcagctgggccgacatatatgcaacagctccgccatgctcaatcgacagacggactgcgaccccgtcgcccatcccctcatcacctgaatataccctcgcctatcgaacgcggtggctatgaagacgaagaggattcacccatctcccctatcaatccagagccgccgcgcgatgcaggccctgctgtgatttccgcgcagatgaagtgcaaagtctttctgaagcagagtcatcagcagtggaaggccttgggcagcgcacggctcaagctttatgttcagaccagcaccaacatcaagcaattggtcgtcgaatcggacagtaaagataagacgatgttgatatcgaccatcgttctcaccgacggagtcgagcgagtcgccaaaacgggtgtggctatcgagatcagcgatatcaatggcgcacgcactgggatcatctacatgatccagttacgaaacgaagacagcgcaggaggactgttcgatagcttgatcgctgggtcagaccgggcggtcaataacagcgtccatcgcaaggggcgataaagtcgagaattccctcgaacccggctagataagctttacgtcctaaataacgaatccaacgaaggtttccacgttacgaaatgcccaatgtaacgccagcgcttaggtgatcatgatcatgcccaatgttagcgtttggccgctcttgcccacagtgcaccctctaccgctcggccttactctgttcgacttgcgctcgttacgatcttgcctcgaggctggctattatctgaccgtcttcaactgcagtcccttcacgaaggagtaggaacgaaccgcatcacaactgtacgacgcgacgccatcgatcggaagttcattcgcttccgagacgccggcgcgttcgccgaggtcaactatgccgactcgttcgtttgatttgccagttacacaactcgtttgccatctcatctgttcgacgcttactgtatatcctacccgactcacccaaatcacatatcgactatacactagaagctggacggaaactgcactgtgatacaagtcatgcctgacgagaccaacccacctccttctgagccggcaaccgatgccgtgcaggccggcgagccccttccgactcaatcggcagctccccgtcagatcgatgagaacacggatctgaaaaccctgaccgatgaggagatcaaacagctgaacgagatggccgagcaaagtgcaatgaagatccaggacgagagggtgagttgacgccaagtcatcgatgggctctcgatcggacttgatctgattcactgccaattgtccatcagccgctcgtatctttccccacgccactctcattgatcaaggctgattttgacgatccttcgaccccttcgcaaaacgtcaggagaaaggtggacaagttggagaaggacgggtgggacatggtctggcggacaaggggggacggcgattgtttctatcgatgtgagtcgttcgccccgtacatgagctcggtgtagccgagacgtacgagctgatatgttcaatccgatttgaatgacgaagctttcatcctcgcctaccttttacggatcctgcacgcagaaagcccacaactgcaagccaaccttgcgttctcaaacatccagtccgctctgcccttgtttgaaaaggccgggtttcagctcgatctggtacgtaggatctctggtcgtcctatgggcagagcccgatcaactgatctcttggcacttgcagttggaggatttcctagaacccctgctcgaccagctgaaaaagttcgaggatgagacgacgatgccgaccgagcacgagatcgtcactgtcttacagaactcggaatccagtcagagcatggtgagtctggcaattcgagccattcgaagggcctttagtctgaagctgatcgaaaattatcgcccgtcatgtagatcgtcgtaagcccgaggcaggcaagctgaacatcgagttcggagaaaaccctaacctgccccctcccctacaggtcctccgatatttcacttcagcgtacatccggatcaattccgagacctttgcaccgtttctcatgcatcccgagaatttcgaaccgatggacccggctgatttctgttcggcatgggtagaaccgacgggcaaggaagccgatcaggtcatgatccaggcactcgcgcgatgtttgggtcaagggatcaaggtgtgttacctggatggaagcagtagcgtcgaagaagaaggaggtgcgagttttgtcgatttcgagattcaagagggacaaggggtcggggaagaaccgttgatgttgctctatcgaccggggcactatgatgtcctcgcaccgcttgccgcaccatcgtctttgacgtgatgtaggtgcatgttatacgatcgatccatacgcgataatgtcaactctacgacgctgccagtcagtccatgatggtattatccctcatccctgatccgtttggagatgtagctctctttatcagatctcggcgaccggggtgtgtatgggtctcttctgtggcgctgatccgagcaacggcgcgcgcgagagagagtcgcgttcttgaattcccttttgtgcgcgcaagcgagctgggccgagtcgccgggaattacagtaggtaggtaggtcgccccaggacacgagacctttttttgttttcccaaaggtcaggtcaccgaggtgcaggtgaaaacgtagacttttcgtactgaacgtgcactcctgcagcaaggtctaccttggcgtttcccgtttcaatccagtctgggcatgtctggtacacagcgcactctttgaaacctgtcgagacggggtccaccacatcaacgtgttggccgaccgattcccattatttttagctgtcgctcggccatcaatcaacgttcgctcgatatcagcatacagactcgactgcgatttttgatcgagccatattgtatcgcacgacacctggcacctggtaagcaagacttgggctcgcgacctaggacgtcaggacgtgctgatgctgaggttcggggcgatccttaaagtccgagacaggtagatcagcagcatcaaccttcggccgactctaacaacagcacgggccgtcgctcctgcccccccccccccccccccccccccccccccgaccgggactgaccttcccacgtctgattgcccacgttatcgcgtaatcgcaagacatcgttgttactcaaaaaggtgaggacgttgtcggtcgctccttgccggatcatcgagtgcagcacgatcaacgctttgaatatgacctggatcgtcaggggagaatctcggtcagtacagagatccacacatcgacccgctcgtcctgccccaggccagggatgggggcacgggggcacgggggcacactgacgatattcttaggttccctcaagcaagacccgagcgatttacaaatgtccacgatagctccatcggtcgtatgcgtggcattgatgatgggctccaggtactattcgagtcccgacgtcaaggaggaagcagatttgggggatcggaccggcatgacatgcatgggtcattgggtgtcggtcggggtgtcgtgtgggatcgtcgaattccgtccacgatgacgtccgcagagcatatccgaagccggtcatgaaaaaaaaaaggcaagacagcagggtcagtatacctcactgtagacaagagatgtcgcgacgagtatggtacgagacgagacgacattcgacccaggtcgaggactgacctttgatttaggaggatccttcttgggtttacacgcgttcttgaccgtcttgtcgaacgacatcctgtgggaacacgatcttggcttttgggcgggggacgaggaggtggtgcgtggtcgaggctcgacttgagagatggatcagcggggttgaggaggtcgatgtgacagggtgattagaaggagtcgggttgataggccgtgtatggtctttgggtctttggggtgttcggagttggtttgggttgcgtgacgaggctggaccggggcacgcgggcgagagagaagcggggaaagtgacacctcgatcgatgccttctgacaacgacgactacaggctggaagctagacagtagtttagaatattacaatgagcagaagttgaccttgcctacaagttgttcgtcctggttatcggcatcgaatgaccatggatgtccgtcgtcgttgtcgtggtgatatcttcgtcgtcgacgtcatcgggagattgacccgggggggggggggcagcggaggaattggaacgatagcgagacagagagtgaacgcccaaagtagccgacaccggggtactcatagagggagacacgcgcgccacacacttcacaaacagtctatagattcaaggtcgtttcacatcgtccccgtcgtctgtcagctactcgctactggatataaagtcaccgtatgtctacatgtcaccagaggggacactgtaatgtgcgatgatggctagaaattgacgatacacgcgctcatcttccgaccccgcactcacgtgcaagggatatttagtccggcgggcgcgctttcactcgggatgtcaatatcacctaatagataaaacatacctctcccaagggtgaacaaagacccggatgagtattggcaatgtggttatcagctactgaagcttctatctgaatgacgcaacacgctgaataggctaaacaaatcgatggggaatcgtgccagcgagatgcgaagatttgggatcgacaggacgacaactcaagggcataaattacctccacgtctgcgagaacgtattcgggagagtttggactccctcgaaaggctcagcttcttcgtccgagccgacttctatctgttcgtcagtccctgctcaggacttatgagtagatcccattgtataaaattccggcgcatcagggggttcgtccttaatcttgcttgaacagcccggatcaacgtgatacggcttcaagcgcttccattcttcctctgtgacgtcaatagaatcaccgggcccgagatcgcacatgaattcaagcagttcacgccttacgggttgccaacctctgtgagcgaaaagaacggtgaaatgggcaggctggtagactaggtgtagaagagtatcgaccagagtcccagcttcagtcatgaccatacagtagaccaagcgggagggacatacatttgatcagctggacaatctccgactcgtacttgctgtatctctttccactagtgtagcgcttgaccagcgtcttaatctcttacagtaatctggtgaaacgctgctcgacgtcgatagacacgtcgaatgacctccgagcgcattccagctcccatgccaactcgctatagtgcaacaccgcccgtgtgtcgcagactagaggagctccaggtacaggaggcactctatcgtcagtgttcaagaatcgcatggtcgtcgaggacgcatcgttcgagaacaggagagactggtccgaatcttcagtggtgccgtcccgatacagcttatcatcgtcaaaactttccactcgcgtatcgctgtagatccagtggattgtgtattgtatatgtttttccttcgacaacgcctcgatatcggtacctgacagactcatttagggaaatttagcggccaagccctggacgatgtagagtagtagctagttttggcgaaattgtgtgatggtgaagatgagctacatacgtcgtcgtcaagggcacaaggctggtaaagtattttcatggcatatgtatgtatatgcagctgctgagtatactcggtactccgagcaaagtactagtacgaggttccaacataggtctcctttgttacagcttataccatccgccttccgtcatcgataaagttggacagacttggatggagtggcaacgctagacgtaccactagactaatagtaccgatcacaacaggacagcgcgtgtgactgatagagtatgtcactatatgactaccgaacatgaactgatagggttgctgaacaaaggatgaacggccaattgaaggcttcctctgaatcttgccaaaagcagcgatggagcaatcagacagcgatcatctacagcggtgtacttcgaagcttccaaattgctacctgataacgaaatcgatcgaactgagtctgaagggattgatatttctgatggtgttgccttttaggctcgatatagctaatctgatcgtgatcattgaatacattcatgaattgagctcaacaagtcctaccatattctgtctcttctactggtaccgcagtggaaaccgactgagccgctcttacgtccatcgaggtctcatccgatgatcgtgtactgtccgggtagaagttgcatctgcttcgcaaaagtagctcgaactttgagcggatatctatcctcccctcctaagagagctgtcgactcgtaagctctgagttcacattggaagaactcgttgaaagcaaaatgagtatgctctgcagcaaacgacagggatggacacccgttcagcgggtgccagtcattgaatgtgtgcggatctacacgtactgtagagcttcccattgagaatccaatcatcttccagagcattcgccaatttttgatagctcgcctgcatcttggaccatccctcgtgagacggttgcttgaagagaatctctaaatcgtctgcgatttgatccaagtcttgcttgaactcgttcgacagctccccataatccgtcaaggctttgactagatctgttcgtacctttcggacggccatacctatagtcgactcgtccggcttgttgccgtcatgcttggaaaggggcgtttcatccacaggagctataactgtctttgtttcggtacgtcggcaatgccgaagtaagctgttccaccagtgactggatccttttgttgagcgggaatcttgggtgggagatatgctgctatctccaccgcttgtctgccggtcgctccgaccggacccgtcagattcgaaggtcgattacaaccgagtctgatcagtccgacccgttctatcagagttgtcgggttgcttggaaaatgacatgtcgttttgcgtgtaagccagggttattggcgcatcgagaagtcgaatcgtaatgtgcgaagtagtgaattggtggtcattgccagaggggccatttggttttggcgatctatgtatatagctcgcgtgtttgtcgcacctcctttgtcgctccaaggagaagcgttagattcgccgggcgaataagcatgttgccgtattgcacctggctatctagaacgttcgaggagaattacgtgatagcaagccgctgagatgacgttctaccgagcgcactgcgttctaatgctcatcgacttgtagactcattgtgcgttgatcttccagagctgcaacgagcggtccagttatggcacggtacatactcgtcctcgagtacactgaaactttgagctgagcctcgacgcgcttgttaccgccactttctcccgaccaagccactaggactaaaccgatacgacgaaagacgacataggagacgagtgcgtaggttcggtattcaaacatcaagggaacaggtgagaatctaagtgttagatcgagactcaacctgaaccagttcgtgtttcgacgatttcccgctattcgcgatattccggtccaacttagtgacttgctcagggctcctcctaacactcgaatcgctactgttacattcagactaatatcatagaaaacgcaaacgagatcaagaaacgtatgttttcagggaggtttctgagtcttgctgatttgtcgaacggtcactgaggtgcagacttgaagccgtggagagggaaccccttcgctcccatcaattcgaaatccctctgtgagacggtacatttatccgctaactccagtcccagaagagcgcgcccaggctcagtcgttcccgagaccaacaaatcgattagatcgttgtgatcttccgccaacttctcgcatactcggtcttgaccaggcttagtattattgtaagtattacatcaggggttcggccgaaacgttctttccggacatacttacgtatgtgattagcctcttccgtcttccatgcgccgacacagcatgattttcattctcgacaaaggagttcccagcgatcactagaggataagttgctatctttgaacttcctcaaagcgtcggtcagctcgtcaatccgttcctgttgagcgccgtcaggaccgatgttgctcggaatattcggcgtaggttttgctggctgctggaaaaaattggaactgtccgatctggtctttgccgcaagccttccagcaagatatcgctgaacgggggaagtatgattctcttcgtcatgagagggctctgaagctttttctgagattgattcccgccacgagtgtttttcggcggtgccggaaggtgcggcagtagagtcaagacagattgcatcggatatcggtacactttcgtcgtgtggaatctcgtcgccattggtcggaccactgtagatagaaacgttcattacctggagtgctcttctaggcgtgttttcggagatagagtagagaaacacaacgacatgtcaggcgacatgcaaagtcgtcgtgatctgttaagagctgatagaacaaaaggtatacatgatcttacccagacagggggttaagcgaccttccttttctatcagtgacgcccttgtcttcggaaagagattatcctgtgcatcatagtaaacgctcacgcattctcggtctcactgtagcaccatgtattaagataccgctggaaacgttcaaactgaagcagtgtgtttaaagtctatgtatgacacagtatggttggatactggtcgcgcgactacttgtccgcactactactagagggaaaaacaggccagggcaaaatctctcccccccgcttcacacgatctaacaagttgaatttcaaattctcctcgaaatccgacattggaacgtgttccagttctaatagcctggcctcttcggaggagatcggaatcttctgctcagcaagtaggtatccagcaagagcggaagctaatgcattggtccactttcaggctcggaatcctgatctcaagatattctttgaggctctgacagacggcacctacaggatgtttgaagcaattcagcagcctgttggttgataattcagcatctgcgctcacaatgaagtgtcaccagaactttattcacttcatcggcgatcaagtcgctcgacttccattgtttctcgaaattgcacctaatttggaggtagctcttttggaacgaggaccatcgttcgacgtttgcactttgttcgagcttgaacagcgcggccgagatccttctgcgaagttctttggcttgcgtctgaaccttagtcctcatgatggccagaaggtcgacaccgacgagttccggttccccctcttggttatctcgaaaagaagaagcaccggtataattgctcattactagaatggagttaccaaatccgcttgctttgctttcgtaggaatggttgtttccctccgctctctcccgaggtttgtgcacggccgaccactgggtgacgacagtcgatacagccgaaacggagttctgtagagattcatcaggctgcgtggatcttttaattccctcagacggatcgtaagtgaaaatcgtgtccatggtgattcttcgagtgaaatcgagccctcccgtactgtaagagttctgcctgccgagcgtggctggattttctcactggggatcttagggaaccaagcgattacgcgttcaaataaatactaaaatggcgggcgaggggaataatcgagcctcctttgtgagctagtcgagaagatggcacgagctagcagtacgcaatttcctagtcatctggcgtaatacaggagcgtacacgtgtgatatatcacctgaacatgacttgtcacccgagcatcgttcccatagaaggtaatcctccgaatgtctttccggctgttcagcaatgaaggcgtactaggcggacatctcgtcaagaactacctcgtctgggtaagctcatccccaaagcgagactggaggattagcagatagggctggcggcgaaattccttctcgttgtctttcaatgtcgtgcctctgaccgtatgaggcacgggaaggttggggcttaataattggaggcactccgactcctgttgcgtgacaggataatccaacagctgaggatgaccacataaagcgtatgtgagccacgatgtaatttcgattcccagcctcctgttagcgaccatttgtacgaaaaccttggaagcacggtctgagtaggatatggagtcaaatgagaacggttatgagcctgttgtcggtgggatttaccgtaaagctgtgtgattgcggcggccgattcttcaggcggcattgcgccgtcgccgcgacgatgcgctttttcatctgcttaaactctgttctgtaatcggaacacatatccttgcggtgagagagcagtaaatcgttgatcaaacgttcaggttccccctggaaggctgtgagcttcacagaaacctcgtcgggggacgtgtctgcggctagtgaggcagcgctttctgaatttccgtctatgctacctgagccggaagtagccctagacgtttcaggaggccgctcgccatgggaatacttgaccaggtgactcggttttaagtaagtgctggcagctggaggggatgggtggaggaagagcttctctctttgtgcctcgatgtctgccaactcctccggagtgacgagggttctcgggtccacattgacttcccaagcttcgttattgctaccaggtccggtagttgctgtggtcccgctgctcatggatgtggtaggcccgtacgtcccagcagggaatcgagttttgctgctgtgccagctcatatcgattaggttcctatgataatttggattaacctgattgatggagatttaatgccaagtcccgtcagtagataaccgaaacaaagacaaacaaacccaaagagtacgtagaacttccgttttataaaaaagcctcttcgctacatgacagttctcagcaagccatttcttcctttgtacagtttggggaagcacttttagtgagctgatcctccgtgctgctcctgccagcgcggctgccgcggtgattatcgctgacgtctttggagtgactgatcagcttcttgataccttagacttagagaccaaatctcatcaggatagacccgggtatcatgccagtaatttcacggttgtactagagctatgttatatccatataaatcgctgcggcccacccacgttggaagggcaatacagatcgattacataaattgaggctcctgcattgatgaccttttgcgtccgttcgaccgtcgctttcccgcgtcaaacgaacagctttgaaagccaggccgagctaccacgcatgacaagaagtttagagacagtaagctttgggtctcccgccaggatcgacctgagtggacgcaaatgctggcctgaagtcgctaggaaggacaacgaagaccaaagtgtcttttagtggcgattgttgccctgcatcaggctcggacggccggctgattgtgtctttcgacagtttctcaccatgggcagcctggatggatgacatagagaaagtggataaagcactgggctgtacccacaggcgctgtacagcctagaactaacgactgaggaattccatccacgcgggtagcagacgttagacgaggagctcttgcgtttcatccgagagcccactagatcgtaggactccctatatgatggctgcatctgtttcacgcctagtcggtaatacctgaagcggctcttgactcgattcttgggcatctgacctcagccgttatgatacacatcgggtagatacatcgcggtctatcaagctagcgcagaccgatcatgaatgtccaccttcgaaacctttgacaccgtgacatagatcatcttagaggtatgttctacttcctctgtgcatcccatcaaggaggtcagatcagagcaactcggaaacatgtggtttccgcgactgaccatcaaagctcttccagaatccctcgcaatccaaatccttctcatgctcgttcttgatttttgcaatttccgagcggtattcatcttctttggttttcgcatagtggatctcgcaggtcgtcttaagcctcaactcttgtaacattgtccatatggttcggattttccctttgtcatctttggaaagctgtgtgtcctgaacttgagttccccggaccatactgtaactcctcgtccattgtccgataagctgttctaggtaggcaagctcgacagcgttgttgagacccggactgaacttggttggagtaacgtgctcaatttcatgagcaaggatagatccaggctcaggggtttcgtcttcgctgtccgatgggctattctcgtacgatgacccggatgcagtcgtggtacgaccgaggcttgaatcggtgggagggcggtcctcagataacagagacatgtttgcggtttggtatagtagatgacttgtagaggtgagcttcgactataacacgcgcgcctagcttgaacgtggatctgcatattcaatgtgcacgcacaggttttatagcatgaaccgagacggcgagagctcagaacttactgctcgcgccctggtctatcctcaacatcctttgtcgtcagatcgatggggacctcaagcactactatgcatcggcgggagcagactgggttagtagccaggagtgttgagcgcggctgtccctcctttgttgtgaggcgcgttgaaacgctttgagcgattctctacgttcgctgatgtgcaattgctgactattattgctggcagtagaggtttcttcctcccttgccaaacaaatttccacgcttgtatgtgtacgacaggtcacgcgactctcagacatcgcaacggtcaattagacatgtacagtacaatatttacggaattctatcaaccatccatcactacttggccggtcacaccgccagcaccgctgcccccacctcccggtacgcccttcccgcccatacctttcccaacgacctcgacgccaggcttgtcccccttcttgtcctgagaagcttgacgcagctcctgtagctcttcttccaaacccatagcctcttccggatccttctcgtcatctggctcgttcacgcggctgagcaagggggcgataagtcgcgcgaaataagggtgttccttgacaggcgggttggacgctcggacctgaaaaaacgaaatgaacgatcagtagaagttccattatgctaagcttcgaccgataggaacgtacttgatcgaagtaggcctcgtatatcctaccatcgtatcttcctaggggactgttgaccaggtggtcgctaaaggcaaacgaatccacgacgggaactgtggcgcgcgggggagtgtcagggtttgcaagaacagactgatacaggcgggagactgactggcgatcttgcgcagatccaggcagagtttgtcaacggtctcttgtacggtatccatctgttgagcattgaagtagccgtctgcacatcaccagatgtcagtaaaacgccaatcgagcccatgtacagtgaagactcacacttgaggaaccacgcgccctgctcctcgacttgccacaagccgtacaacttggcattcagtacaagaacatctttctctggacctgaggcgtatgtctcggctgcttgcttgatcatgcggaagatctggaaggtagtcgattagcaaggtcgaaaattgggcagagtgacaagcacaactcacgtatccgatggtatggagcttggctgcgatgaatcggctttgactgcacctttccatggcttcgtccttgctcaaacccttgcctagctctcgagcatagtccgcggcggccttcttgacagcgttagcagcgacgcacgcccagcccctgtcgatgtcctcgagatcgagcttcgagttactattgttggtcagggtttcgggagaagcgaggtagctgacgcctggcggaagaggcttgccgcgggaagccgattcccacgatgagacgagcgatcgcccggcctggagagccagaatcgtgttatcaccttcccatgtgcactgtacagcaaagtcctggtacattccgggcagcgtggagtacctgtaaggtgggacggctcagatcacggttgacagctctgtcagacgatagctaggactcacgctgaatacccatgacctccgcaactctgtctgcacttctcgatggtctctaaacaagcccacgtgcagaacgccttcaatcccgcggatgtagcgtgcgtctctttcagcttttcgagcgtctcgtgcatgttgggctatgcaaatgtacctgatcctcagcattcgcgtaacgtggatcgatcgcacgaaagcttacatcggaaggctcgagtgtctccagagcttgtgtcaattcctgtcatcagagattttgctgctcgtcaggcctgaaagaatgcccgtagcgtttgtcttgctactaacctcatacatgttggtcaagatcaaactggtaaaaccgatcgcgatcgcctgggccatcaaaggctattcccaaccattccatatcagccctagtcgccgggaacactcgcgaaaaccctccggacccaccatcaatctcctctggtgaatcgggtaatcgagcaattgcgtctcgaccttgttctttcccgaggcgaattgccgcctgaccgcggcgtaccttacggcgatcgtcagggcctgcaaatgtcgttccccggtgtgagaacgtgcaactgaaggctcttgcaagatggctcgactcaccctcttggcggtattgctcgagtccgctaccatcccgacacgtccgctcaacaaagctccgtaagtcaactgagccaggggctagcgatgcaagacgatacggtagaaccaattcagcagcggacactaggcagctgcggagagtgaacacgactgaccggatcggtgacgataccatccctcgacacttgcgtatgtttcatcaacatgtgcgctcgaggaaccctcacatgcgtaaactgtcgaacggatcaagctctatcagcacgtcgatccaggagcgattcggggtgaccgaaggatgactgacctggatgtacccgttatcgatcccatccctgcccatcttcttgccgatatcgccgatcatgacgcccggtttcaattggaacgtcctaacggaattgccataccgtgccacaccataagcctgaccgatcccgcgatcaagaggaaatgcgagggagactgacttggtatcccggagctggacaacaaacgtcttgaccccgtgtttcttgcccttgacgatcagttgcgcaaagaccgcacaatgcgtcgcggtggaggcggcccctgtccgtcaacttggatcagccatccggactcgatttcgattgtcgtagaggaacaaggtcgtctaagggggggggggggggggggcccccccccgaccccccatttcggagtatcagggggaggaggaaagacgtcgacgggcgcccgtctcggggggtgttgggtgaaaatgacgaggatgaggacgaagacggagaggaagcgacagacgtcgtcgacttttctcaaggacgatcacaatcacattctcaccgacatggaacgacggggacagccccgccaggtacgtttctcgtgaaagagacggacgagcaagatccacgagcgggagggccgaggaacccgtttgcgaaccctcagatgggagcaggggcagtgttgggagggttgtttcaacctttggcgttggagagcatgttccatcctccacctacgccccccgtcctcgatctgacgcagaagcagaagcaggtcgaggtggccgtcggttcatcaaggagtgggtccggtccggcgtccacggtcggatcggatcgtttgcagccgggttcgagttctgaaccatgctcggagtctcccgttgggtcaatcgctgggtctgcgcacgaatcgtcgtccgaggataccgccagtcccgatgccaacgttgtcatgaaccgatcgacctcgcctaccggacctgtaccttcctcgttgaccggaccgagcaaacaaggcctgaggaggacctcacattcgtacgtccctgcgaggccgagtcgactgagcgagagtatctcgccagagagctccaaggcgggctcggcgagggcgtccgagggcggatcagaagaacattcgttcgaacgagaacaggccgacgacacccaggagcgaaccgagagtgatcctcgggcgactaaagttgagatgaggaggttctccggtcaaaaggattcaatgagggacgtctcgttcacgttctcgccacgaagggaatcatcaccgggtcatctctcggacggatcgggacctcgcgagatgtccacgccggagcccacggggaaggggtccttgaagttgttcaggttgagggactcggtagccttctacccggtcaacgatgaacaagggttggagacgcctttggtctctgctgggaggaagaaacgagaagaaaatagggagaggcaaatgaggtccagctcgggggatttggccgaccggagcgagtggtccggagacggatcgtcaccgggacgcgaagaggaggctggcgagatcgtccaggaagaggcaatggaggatgggacgagcacggacgaggagatgagggagaggaaaccgaagagaatcaggttggattctccctcggtcgattcaatatcagcatccccagcgtcgtacacttccggccgacgccgttctctgagagactcccagagtccagctccttcaagacgtcagcaagacaagtctttaacctcgacgccttcttccgctagcgatcggtcaccgagctcgttcaacgacacccagcgcctccagttccatatcggcctaggctccccacgaccacgggacggaacacaagtaccggggaacagacagagctgggaacaacgcggcgtggaaatgttgcaacatatcaggagcaggttgttggtcgatgggaacggcaatcggtccgtcgcggccagcccgagcaccatcaccagtagtggcagcgaacagagtcccgaaagctcaggaagacgggaagagtcgtatgatgggaccgtacgggaacgcagcggtgagtggcggtttgagactagattgcgtcgcccgttgctgatttctggtcgtcgtcgattgacagaatctttgtcgggagagagcggggaagtcaaggcgtcgatcgatatcgagggcatctcccctcttatcgagaggtaccctgctccaagagcgttcgctgacgacctgcccgcaactcggacaagcagtgtcaataccgccatctacgtcggacccgatcgtgctgcgtctcaaaccacgagcagtgtcaccgttcgaccgcccatagggcccagtggtacggtaaattcgcaaagttccggatcaggaggaaccatcacgaccagtggaagcggaagcacggtcacttcgaaatatctcagtgcagggatggatatcatggacaggatcagggaaagaaagtttagcgagagcagcgggaccatgaccggacccgaccacgaagcggatgcacggtcagcttcgagcgcgggtcggccgtccagctcacaatcacagaatcggccagacgtcgagactcgggatgaacgagacgattctgccagtgatttgaggagatctcgtatggcatccttgcgggccccaccagcacctcaacctcggcaagtgagatcagtggcttccagctcctccctctcagccagctctcaaggcagcggaagaccctcctcgttgccgttgaacagacccacctcgctcgctccacctccttcgtcgaccgaagacatgaaccgtttcatctcggcgaccaccgtgacgacgcacaggacgaccaacaccgctgtctccacctcgttcgtgaaacaccggggcccgccatcaaaaccccgaggcctgcagagcatgggcctcagcgacattccccagataccttcgcaagtcggcaagatggtgttcgactctcaacagctcaaatgggtaagggcttccggcgtccgtggcgccagcggaattggtaccgtacttgaggagggagaaagtagtgaaggcagtctggacgtctttgcaggcctggagtcgctgcgagatgatcgggcagggcctcttcggtcatcaactgatgactcgcttcagaaacctcaacacgctgaaagctacgaccacacgaagaatactgaaggtgacctggaagatcgagaagaatggctcacgcgtgaagttgaaacgcgttcccaggcgtcggctgctaacatccaacccgatcaagaggattgtgcatctctagacgacgtcgaagtcgaagtcgatgaacagagcattcgacgatcactctccatcagtcgcgtcactgggaattcatccgatgggcatggagaagaggtgatcgcacaagacgcgcaatgggaagaaacccggccccagcttgtacatagtcaaagcgctccgacgcccctggagccctgcgctactctcgattcgacacccttacgctctgccttacgtggccccggctcgactccagcatcggccttgaggaaggccgctacgatgagggattccccggcctatggtgtccttgacagtgctactaagcgcaacgtcagcttctctgacgggaagcggccaggacaaattcaaactaggaaaccgactacgggtcctagtcacatccttgaacggtcgaacatctcgatccaagaggagcccgataagtctgagggggatgtcttccgtagcgtttcttcgatcagcactccaaagtctaagcgccaacacccgtcatctgctagatccaagcgtatccataaccttcttgaggatatcgaaagcgaatcagctggacaacccactcctacgaggacttctcgcggcgttacttcggccttgaccaagtctcaactctcatccaatcagtcgtcgacaaaagagagcgattcggatagcggccgggtgtataggtcgacacgacgtgaatctcaaaacaaaggggacgccacgttcctgaccgagtgctctttcgcggtctcgcacgacaagctggtcgaaataatcaccgaagtccagcctttcgagccttattgggaggatcttaccgcgatcgatctgtctaaacgaggtgcaacgagtgtagcgagactcaaagaattcttgccgaaactggatgaggtaaatttgaacgataacgagattagctatctgagcgggatcccttcatcggtgcgaactttgttcgcttcgggcaacaagattagcagtcttacggcgatcaatcacctcaacaacattcaatacttggatctatcgaggaatgaccttgatggcgtgaatggtaagtcgctttgtcggacgttgtgggtccgtccatctcattaagtccccctcaatggccctctagctctgagttgtttacgacatctgcgggagatcaagctggaccacaatcgtatcaccgacctgggcgacttgctgcaaacagattctctcgtgaaattgagctgtgcggggaatcgtatcaccgaattggacctacgccatgcgaaatggccccgcatggaaatcctcgatatctccgacaacgatattacaggggtatacggtttggagaagctgacaagtctggtcaccctaaatctcggtgagctagaccatcaacgtaaacatgcggtacaaccaagctgaccggtatccgtgtttcagaacgcaacgacttgacccagttgatagtagcggagccgatgctcagcctgcgagtcctgcgggtctcgaacaacaatattgccgactttgacatttcatcctgttcaagacttcgaaccctttacgccgacaacaattcgctctctggactagggcgaagtaacctacgcgccgtttcgaggctggaaaaccttagtttacggaatcaacgaggcagcgctctacggctttcgtatgatgatctgcgagacgtcaaacggctatacatctcgggtaagctatcctgctcgccagcctgaacatgacctgtgctgatcaccaatatcacatgcaggcaaccctcttcctgtcgacttcttcccctctcggtcactatactcgatggcttatctcgaagttgcagcatgcaaactctccaattggccagcggatttcgcgtcgcgcctgccaaatctgcggcatctcaatctgaactataactttatcgaagatttgagtggtcttcgtggaatgcaaggtctgcgcaaactgtcagttattggaggccggctgggttcgacaagtgcacgggatgtcgtggccgatctccgagggttgggaacactcgaaagcgtagatctaaggtgagtctgcttcgagatgctgagcaaccctcttcgaagcctaactgtctgtgttgcctactgcagaatgaacccatgcacgctgaacttttacctacccatcatcgtaaccgataccgccgccttctgttcactgcgatcgcaaggccaccccgatacccctggctcaccctcttgggtcagcatggacgtcaatttccgacgaagtctcccagacgagtggtatagcaagcggttgatatatcgtggtctcgtcgcaatggcatgcgaagggatacaaacaattgatggacttcagatgaccaatgctgagagagcgaaggcgaggcagctcgtcgaatcgtctcttgaggatgacccttgaacgctaaaatttcttacgaccttatgattccgtctgaacactactactgtacacatcaatctttagccagtgtatcgatatgtgggctcggtatctcgatctcaccatgcccttttcatgtctgctgtgccttctttttctgtttgcgagccacacttgccggcaccaatccgaggctggttgtggctagcgaaccggtcaaggcgtccatgtcggtatcgacctggctgtcgggttcccgggtgcccgtaagcacttcttccggtgcttgtccttgtgtgaccggagccgagtctgtcatagggtctcttgacgagacatcctcaggttcgtccggctggctgtctttgggcggtgcagcacccttcggccttttccactcgggtcggatcatcgaggcccccggaccaaaccgcttgaccatgtcaccgatctatgattgcgtacttatcagcatgattcggagctggttggggttggagtaacatactccgtggtttgtgaccgagaagaagtactgcttggaaaagtctgcaagtcgagcgaaagcttcagcaaggtcgggtgctatctcgaatcggcatagcagacccacggtgaatctgtatcatatggttccttcgtcctcttggggtagcacatttcttcccgcacgcttctttggggagaaaacattcgaactgtacgacatacccggattgtgagctcggccggctgtggatcaagggggttgtgcaggtctcacgatcttctccccggctctctgttgttcggaagccaacgggtcgtgattttcgatttcatgctgaccatatcgagtaacacgaaataaatctctgagactagcggtggatgttatagctatagggataggcgcaagaggctcaccaactctagcagtctaccatcggggaacaccttgtgacacttttccgcttggcacacatgcaggtggcatcggtcataatgcgtctgcagctcacccggactaccgaactcgttcgggacaccggaacatgtcggcgggagttggcaggtaagacgagaatcggtgacctggggcagcaggtctgtccgcctgtacttgcttgtcgatggttgagttgtcgagcctgcagagctgtttgaggtcgacgaactggctgaaagcgagcgtgctcgcttcatgaccacgacacggttcgaagagtctcattcatccgtgcttgcagctcaaagatcctcctggagagacatcacttgctgtgaaaaagactgcaggatcacgacgaaacagcacgaacgatccgtcgtcaagtagatatcccaaacgaaaggtcggatgcaaatgattcgtcatgatccagtatggactactgcccgttgttgttcatacatcgttgtgcacttgtgtctatcattcatacaacccctgagttcgcatatataatgatgatgttcatctagacctgatagaatgcttcgacctcatcggccggcatatgatccctcgcgaactcgtcctcggtgccttcctgtataggcattgggccgggttcctcgtcgtcctcgacctcgaacggctgatccagtagccaatccgtgccagaaggtatgaccggacgtaaaggtgacgagttggatgaggaagaccgtcttcgaggatgctcattgggtgactttggcaacatggacagttccggagaaatgtgctatcgaggtaggtgacacccgggtcaatcgtgcacgcaaggattttgaagggcaagacatcgatacaccactcacctcccaggtattctcgtttccagtgctcttccttctctgcctcgctttgatgggatcttcctctacatcgtcctgatcgtcaaagggcaaccgcgcgtctggacccaactcgccgatgctgacgacgctctcagaatcgctgatggcatcatcgtgctgtcccgatcgagccccgatgatatcttccaaccgtgaccatgcccctctattctcatgtgatgccgcgttgccgaacccaaagtcttgctgctgtccgggggatcgcggtaccgagggataggtcgcaaacgcgtctcggaccgcttcttgagcgctatcggctcccaggacgctctcgataacggcctcgtagtcgtacatccaagcacccatgatggtatcaggattgtaatcgtgttcaccatgcgatagcttgtcgagcaacgtcttgttcggagggaagacgtcggaatctgatcgctcccggaagctcgacgctgacgtgacttcggcgggacctcccgcagcaagcgagtccgaccgtcgatgagcagcagaaatggcttccatgccgatatggcccaatactgaagcgtagtgtttgttgtggtaaaacctgaccagcgtgcgtaaagtcgattcgacggcactcgattcttcgagctcttgctcagagtcggcgagggccagccactcgtcccgcaattcaggctggcaattgagatagattgaggtgatagtcttcatgttcgctgcaaggttgactgatcaggagcgagcctttcgcgcgaacactcccattctgcgcttacaatgtctccatttgcgaccgaggaatggaatctgactcttgatcaccttgagtatcgacaattgcagcatagggtgaggtactctgagcattcgtttgaggatttgctgtgatgggatgccagaccggtcagtgccagcggtggactgaaaataatccgagactagctcacactactcttgtattgtaccagcaggttaatcctggtaggtcgacctttcgtcaactgatgcataatcttcatgaagttgatgacgtagaaaaagttgcgccatgagtagtcgttcaaaagttcgacttcctcgccatcgatcgtcgtcgtcgtcgtagctggtcgattgccaggcctcgcgtcgtcgttatcttggggtccacgctggtgaaatttcaagtgacaatatcggaataggctgccaggaattcaagtcagtgaagcgagacaggtgagtgtattgcagcgggtgagactgacttgtgatcttccttctcgtgcttgctctggatcagagtcaagagttcttgaaggccgaacatcttcaagaccaacaacaggcaattcgaatcgatcaggagcgtggaaagatgctgaaacttgagcacatctatgaagcgtgaacaagtccggtctcagcagagctctgccttgagggcagtggtctcgcgtactcacgcgatgctttaaaccatttcaatagcaagagcaggatggcggacactgctttggaagtgatttcgcgatggcgagcgacatcgacctcttccagcgacatcggcttctcttcgggctgttcaatggctagcagagtgataaaagctgaggaccgcccaatcgtcaggatactatgggtcatcgctcaccagtgataggtttctcttccataggagaagcaggtccgcctggctgattggcatttacggaattcccggtgacggtagccagcagcaacttcaatagcacgaccacgatgctctgggcgtatggcaacatcgatcgctagaagccatgaaccctttcgcgatcagcgtatcgtcatgaacttgagaccgcgacagacctacatatatcacctcgactcggtataaccgcttcagacttttacgcttctgcacagtctccttgacgccggccgcatcgtttgccatctcccgctcgatctgtcgttcctccaatttccaatcctgtaccttccacgcggtccaggcctcgtcatctgcctccccatcccctagaccatcgaacccgtcctcgtcctcgtagaagtccttgctccgctcgatgcccatcaaccccgtggacaagcttcctaatccgaacccgagtccggcttcttcccttatatactcgtcccgggtcttgcacagctgatgcagtccgagtgggatgtagatatgtttctcgtacaattgatccgcctcgtcgatggccctggggactagacgcgatgtcgacccgggcccctgtgatctagtaaaggggaagacgaaaggtttcgtctggtccgtctgatactgttgtttcttcggcttgacctgcggggagggaggtggggagggcgccggggttcctgcttgaggcaagttctgcgggttggatggcccgccctgaacctgctgttgtccagcctgtgctggttgggcaggtaaaggcccggtttgccgagccgaagctcgagagacgaacgcgggtggtaaaccctcctcgactgaactgtggtacgatgaccggataggaatcggttcgatcgcttgggctagtttttcccgttgaagcgcctcgggcgtcatgggtgcgagaaaagtgggatatttggtcgacaagtcggagcgaaaattcttgatcccggtcggtgttacgcgagtgaaccctacacgcaagtcgaggtaagtctacagtgtcaaatcagctctaggaatcccgatcgactcactccttcgtacgggcggcaagccgctcaaatcccgctgcaaatccaccgcccgtcttgcatcgttcaacccgccgagacaagccagcaacgttttccacaacaataacaacagctaacaagagcgcgatcgtcgacgagctaagtcgtcggcgcgggtgacgacaaggtatgtggtcagactcacctttttgaccgggaaacctcgagtgttcttttcacgaagtcctgctatcgtcctcaacaggtagaccggcaaaggagggtcgagcgccactgtaaaggttcacaataccggaccgaccggacctctctatcagttgccaattccaagagacgttttgcgcatcggacctacttagctcttccccgaaatcctcgtcggcccgacaaatctcgacgaggaaataaagcactccgaggtaaacccccgtctcgtgattcagctcgtccatctcggctgccaactcaatggcttcttcgtccgacttgacgtgtgaacagtcggtcctttcccacccccagcgcaaggttcaaaatcgaatcgagtcgagtcgagatggacatcgaggtcagcatcctgatcaccaaagacaatcgtcgacgccggcgggactcacgcgatcgcatcatgccgacggacgacatccatcagacaactcaacccgacgcctaccccatccaaccccctgattgccctggcattctctacagcccagtgcaactgttcctcctcggacgacgtctcggcgtatgaaccctgtaagaggtagagcaggtgggaagcgttcttcaggcggacagagggggaagaggattctagggcgtgtaggagcgtgaggaggtgggtttggcgggttttgaagggagattccgtccatgctgttcagctcgaatcgaggaggggtatggtatggtattgcagtgtgaaacaagtcaatctcatcagccggtcgattcgatcagacaggttcgatgattaggagagttgtacttgcaccccttgaagttgtgctcgaatagcaccttttggtcgcgcaacatcgagtccagttcgacgtaagggaagaattcttgcagctcggccatgagcgtgtcggtatcgtcgtaccgaaaggtgaattgttgttgctaagccgggagggtgcacgaaagagatggggcacgtgtcagtcggtcatgcaggtgtagatcgctcggaggcaagtagaaggagatggacggaccttttgtttgacgaatggggctacgggaggggcttgtttcagattcatactatcgatcaaccctcgttgcatgttcgccgcgctcgtccccgcagcgttctgcgccccaggttgaccaggtccgaccaccttggaagccaacgcccccataggcagacgttgaagcgggagacccgggatggtggctcgatcttgattcgattgaagatgctgggatagaggtggttgtggttgctgttgctgttgctgctgggccagcgtgggcacccgggaggcgtattgcccacccggttgaccggggttggtagtcggaagcaccatgactacgtgttcgacccgttcctcccagctaaagagaggggtgtgctaggatagacggcaggcagtgtgcatggaacggtctaaaaggttgaatgatgaacccgcatcatatgttcaagtcggggagaggttgatcggctgcttattcggaagtaatttggtgaactgttatcaaagaaagtagcttcacaacgctgatactcgctgacgtcagctgaacctgctttgacggatgacgtgtcaaacgatatctcagcttccacaataataataattatcggatgacgcagcgttccatgtccatatcatcacgatcatcattcaacctcgaccattcccaactcttcatggcaatttgtggactcatctcataccgaccatataacgaccactacgacgacggcgcactagacaacggacaatcacgatgcaggtagatagtacgccggacgcttacctcgatgcgcaacaagctcgagcttcggacgatttgaagggatggtggaacgatttggcaaaggcttacgatcgaaagtgagcagcgacaatcaaattcgtcggttcagcgacacggtgaaaacgacccggttcgatgctgatcatgtgtcgtggcgcacctagactctggcataatgtcacggtcctgttgatgagattcgcggcgaggtcggattcgagtcccttcctgatcgacctgtttgaaaagtgagcaaccggtcgttgggcatcccaaattcgcaagccagacgccgatgactgacgtgggatctctcttttcgggaacaaactcagctttatccggcctatcgagtccaagttgaaccctttaaggctggtcgaactcgcccgtcgtgtctcacgggaataccctagtcagtcccacctccctcccactcttgtccacagatcgacctcataccaagccgatcccgaccttgcttccgaaacgcagatccaaccgaatccctggatttcctcacccaagtccacgctcgccttccctcaccccatcgtcctcccaccgcagaccccgcttcccccgcatacgacccctcgatcgcctacatccgataaggccgactcacgcgatctcgtcctggacgaccgtcttgccccgagcaccctccctagagaccatcaggtaccacctccacccccaggccgaattgttcctcccatctccgttaaccaagacgtcttccccctcgtcaccctcttccttgccgatcactccgtcggaatccaacatggcctcacaccaggccttttccgcttgccactcctgggcgccgaacctgttgcctcccatatcttccccgagggaggaaaacctcgtatacagccagtgtagataagaccaggtgtgatagttcttggcgtcggggatgagggattcatggatgaacgcgatctcctttttgaggaggccgagatccgggttgaggtgagtgaggagggtgagacgatgatgccagacttgatacgacttgagattttccgaagcgaatgcgttcatcaacgagagttcttcgaggaggtctgactgtaggtgtagcagggtggagaatcggtattgcctgcaagcggagagggtttgacgggagagtgagctttcgtctagacctttcgaacccaaatgaaaggaccgactgagctcaccagacggtataatgagcagggttgagccggatgatatgttccgtcagttcgagcactcgaggtgatttttcgtcctccgtcacgatggctcggaagtaggacatggcgtccgaatctgctcgagcgagcgagagtcagccgtccttgcctagcctggggacatgggacgaggtgttcctaggactcacattcctcggaatacatgatcggtaccaagccatcggaaggttcgacctgagggagaggaatcacgtctgaccagccttgtctttcagagtaaggggtatgcgaggactaaatgggagattggtcagctcgagcgattgcaatcgatctcggctcgagctactaaccatcgttgttgctgttccaagggtaagcgtcgtgctgaggtgttactatgtaaatctcagtgtctaaaagtcatagcctgtggggattgaagggttttgtaccacgaagcgagtatgataatattgatgtcaatgaacaataaagcacgatagatcaggtagagatcgaccgaccgaggtgcccgagtctactcacactcagtcagtttattgtcctctgcttccggtaatttaggatccgaagatcagcgaaaggtagcgaggttttacggcagagtgagtcccggcgatgacggcagcgaacgctcccggttgagatctcggaagtaaatttgtttccgattcatcaggaagctaagaggggaaaatgtcaacaaacccggtctttgacggagatcttgcgtcaacaatcccaggtgtagactcgtgtagacaccctccatcatcatcatggtcatgcatgtccaaggggtcctgcgtgtaatcctcaaaacatattccaagacggccgtcagatctcttcaacatcgctggaggtgactctagcgtcgaaacatcaaacgatggaccgatcgacctcgccaaccaaatcgccagcgacacctcgatcaaacctcaagtccatgttgaccgcatcgtgcacatcggcatcgggcatccagatcactccaccatcagcatctcgtacgaacctcctctcgatcactcggccgtttcccgaagatgcgaccgagtatactgacgaagagaccggttcggggctgaggaggacactctcatcaccgatcaggagggcgagggactttatatcaggctcggactcgcacaccgcatctgatactgagagtcaggacgagaaccatcgacagtcacaccaactctcgggactaaggaagagccctagctggagtacactcttctccccttcgaaatcctccaagctcgggcatcgaaaggaacctgaacaggcggacgtgatgacgacgacggacgaagaggacgaggggaataccactcggcgtagtctcgggtcgcgcaaggggatcgatcgcgcgcatagtttaaaggacaaagctttgggtctcattagaggaggtaaaagggggagtttgagtagtatctcgagggagggtgagtcccgtttcataatccgtagctgtctctcataaagctgacgtcggttgattgtctgggtccttcagccagctcaccgtcgaaagatcccggtcagaacatgtcgggtcacccagttttggcggatcagacaagatcaactactcctcccggaactcctcgtatgccggacttgtacgcaccaccagcagcagataggtctctaccccgctcgaccccctcaccacctacgtcgactctcatcgaggccaagatcccgtcccctcgaaaatctacaactccttctcccaggaaatctactacaccgtcaccgagaagaccgaccacgccttcctcgtcttttctgcatagacgcgcttcgtcctccccttctgcccccgaccctagcctttccactccgaaaccttttggtggaccgtcgggactaggggatatcgcgctcgggcccaatggatcgcttaggcggggcattttaaaactcgccgagactccagggagtggaaggagcggtcagtttgtttgagaatccctcaggtgtcgatcgtaacgtactgattctcgcacggtctgtctccatgtctgaccagtccgtttcggatcgaggaacgcttacaggatcctcacgcctacttctccgacaacgtcgtactcttctggcgatcaactagggcccaatctattcgcactgggaagacgaggtcgacaagatgacgaggatggcgaggacgtatctcgacccatcatcggcctggagagctctgtcagcgcggtcggaaaaggcagaccgcccatcaatcggatgggatcctcttcctcgtcttcttccaccggttccggaacgggcaaaaaggtggacccggttgccgaatcgccttcgagaaggatgggaaagaaatcgtccatagaagagaaattgagagagctgtacctcgttggcaaaaagacgatcgagtcggcttcctctgcatcttctatcgatgcagagagcgaggacgaacgcggggattcccaagcgcattggccggaattaggctctaccttggatttaccatcagaaggggcgttcgagggttccgaatataccgatttcttgcttgaagatagacggatggaaggactcttgccagaacaatcgagggtctcggaacgaacggtccaggcggagcaagtcacctcgtcctcgtcatccttctcgaagagcacgcctcgacggaccgtcctggacgcttccgtggcagagtctgagcgcacacagatcttgctgagtatccgcgaaaagcagcaggcgcggatcagggaagaatcgaccgtcctcggtctactgggtgatcgcactgaagaatcacgaagatccagcgagacgtcaatgtcacgaggcagtccgagctacaaggcccattccagtccaagtcaacaaccggtcagcacgacaccaaagatcagtcccacgtcccgtagagtgtcatcggcgtcacgaagaaatgtctcgatgagtagcgacaaggggtctttcgacgtcttgtcgcactacggagacgagggttcacctgctacgagacaggcccggattagcagcggaaccagcgccaacttggcggttgatagcccgaaccttagtcgctggtcgccagatacaaccggagatgagcctagccggtccaggtcggcttcgttgtccaactcggacgtacgtaatagccgcacagaagcttctttgatggatgagagcgatcggagcgttggcgtcatgatcgtgcatgaggatcagcctgtgaatacctccggcggggtatatgaagccttcgaggacggcaccgagagcatgaaggacggttcgagtatggaaggagccgacaaggtctcatcgaagagcttttctcttcgtatgcccggcaagatggctgcgtcgaaggggaagactagcccgggagaactcgatcgatcaagcgatgcaactttcgagatgtctttgaagcccgcgacgcctgaaaaggcaaacgaggccgataaaacaatgttctggactccaggttcggcctttcaagatctttcgctctcggaatttacgtcaccctcgagtaattcgcctgtgactggcgagagcttgaccaggtccatcgtgtctcttggccacgctcttatcgcagcagaagatgtattcatcgaccagttgaaagccgaaatccagcgctggaaagggatagcgcatcacctacataataaagttgaagtctcggagagcaagcgtcgctcggacctgcaggcgcgcgtgaccccacagtctccaagcccgctaggagattccggactcaatgcgaaatgtacacagctagctgccgatcttggcaaagcacaggatgatcagcgggaagccgagatccagctcgaggggatgcagcggcattacttggaggcgaaagaacgcgaggaaaggtggcaggcgcggtacgagctggctaagaacagctgggaagccgagaagagggaaaaggaagagctcgcggtccgaatgagagatgaggagatcaaacgagagggtgcaagccctcttgaggaaagtgcaggtgagtgtttctgcggttcgcaagccaagcgatcatcttagcctgagcgtcatcccttttgaaaccagtatcagccctgaagctcgaaatggaacgactccaaagagaaaatgctgagcaagcagcgagtctcaaggcactggcagaagggagcagacagccgcgcgaacaagaaaagttgctgcgtgaccacgccgccaatcttgaaaagcatttggaggagcagcgggtggaagccaataccaggctgaaagccctgtcaaaggacaactcgaccctgaagaagcaacgcgacgacctgcatgaacaccgtcttgatctggaaactgcgttggacgcgttgcgctccgagcggacgtcggtgcaacagctacaaaagcggttgacgcggaagcaggaggagatggagacggatctccataagagtcgggaggaacaccagctcgccatacagcagcgcgagaacgaactcgagcttgtccgcagtgagaatacagcgagcgaggagaaatgtcaagccatcgtccgtgagcgcgatgccgctcttcggaaggccgaagaaatgtcgaacgagatggacatgatcgtcaaacaagcaagcgaaatcgaacaacagcacgcaaggctcggagaaagaatggcgcaagtccagcaagaacgggaggagttgtttcaagagaaaaaactactggtgaccgaacgagacgaagctcgcaacgcaagagatgtggaagcggctagcagaagcgagctagtcaaggagtgcgaagagattcaacagcgtctgaggacggtatgtagcgaaagcgggtatattctagtctcgattctgaccccggtgcttcacagcttgaagcgcaacttcaggaccaggaacggtctatggccggtatacagacttcacataaggagatggtggttcgcctcgagtcggaattgcaacatcgacgtgaagaagaactccaatatcaaggatacatcgagtccctggaagagcagttggtgcaatccgagaaggcgtcgacccaggcgagatcggaagcgcaagtagttaccgaggcgatccatgctatcgagcagaagctagcgaaagcgcaagaaggccacgagcaagatttacacaacgcaagggagcgctttggcgttctagatagagaatatgttgggctcaaggaagaccatctaacgttgatgtccgagttggacaggatgcattctctactcgcagagagtgacaagaatgccacaaactctaccgaaagcgacgcatcgcttcaggcacgcattcgatccctcgaagagaatatcgagagcctcaagaagaacctgattggcctaaggcaggaaaactccgtaaaggatactcagatcgagaggcttcagcgggcgagggaacagcttaaggacgacaaggaaatgttgaacatcgctctggactcgaagcaacaggaagtcgagctggtaagtagatgtcatagctagaatcatcgcggtgaactgacaaactcgtgcaatacgcagcttcgtcgcaagtatggcggcagccgtcagtctaccaacattggtgttgagcagtacggagaatcgatctccgccacgcctgcggcaagccggcttgcggccagcgttcgtcgacagaccgtcactcgacgctcttccactgccaacatggcaacgccagtgcccgcccaacgctttctcggccgaggcacgccctcgacgatcaacgccacccgccgtttcccatccgttcccaaatcgtttgacgcccaggtcgacgtgagccatgtcctgaactcgtccgtaaagttcaatcgcaaagcgtcgctcggtctttcttccaccaggcgttcgacatcggcaacaagcagcaagaggcacgaatattcgaaccaaggggcccagtcccggaccactgaagctgaataccgcgccatgtcgcttgtgcccagcttggaagaggcatcataagcaaatttagacatgtgtttccacgaaaacccattcacggccgcatgtccggactttacgccgttgtatgtcctatgattataatgagacactcttgtaatagcgtacgcgaacggaatcagtcgacgcccgatggaagaaatcctcggcagctactttcgtttcgaaaccctgcgaatcagatttgaagacatgtttacgagccatgtggcgagaagaaaactcacctctgcgctccgcacatgcagagtttattcccaggtcgtgaagcttcagcagatagacctttggcccccattggctcgcaagatgcgtttccgtaatcccatgttagctcctcgtccgccgcaatggctcttcttgtctaagcaaggacgggagtttaagcgatcaagcaacccgagaggcagggcggacatacgaatatggctgggcgtggaaacgctcttggaccccatctgaccagttgtatcagacaattgggatcgcacgaatgattaaggaagcgtctataagtcgactcccggtaggtcatcagatacatgcatcctacggctactttctgtatacgtacgcaacgttccccatccgagtagcgtcgacccggccccacactttgtcgttctcctttagggttaggatgtagttgccccacataggattttcccgtagtcttttagtccttctctgattggcctgcctctcagaaatcacttctcctgcataaagcgagacgaaggacccggctcctgcagatcgagccgtcctgcaggagaaccccttttcctcatgatctttcgagaaaaagatctcgagctctagactagccccacactatattcaggcttcagcagtcgagatgttgtgagttccgagactcacccgcaaggcctttgtgtgacacggttcgagcaattctccgcggagcaatggcataacggaccacactctacgagcggcaggttcggtggcagtacatccagctgaagcgagccatgaatgtcgtagaagtttcctacgcaacatcataggtcagtcgtttcgctaaattggatcttcacgttgcttgctcacctgtctcctcgacgcatgcacaatcgcttgtaatggtgcagtgacctgaatcatccgcactatccatgcaataagcctcgtcctcctccgggtcgaacgggtactgcagagcgatacccgagggcgagaccagatctgacgtatactggtacggtgtagaaaatccaggtcagcacgttaccgagcggagtacagaggaggccgcttgcctgctggtacatggtcgccaggagattttgctcaacttcggtcaagcatagccggcagcgctggcctaagtcgtccatcctagtgtctgaattcactcccgcattcggttcggttagaccacctgcccttaagtcgaattacaacaattgggcgagcggtcagctttttttatttacctaccccaactcctttgcgacgatggccgaagcagtctcgctccgcgaaatgtgtaccgggccgtttgtacgaagcgacgcaatccgtacaatgtcatcttttgccaaaaatgatcaagtcacctcttatacctagcagcatacagacaagggagtgttgtgatatgtagaggaatgtactacctgattgctagtggatcgttagtagatatcctttgatatcaccgtggaaatgaagcagcggttccagaccagagccgcccaccgcactgccagccaaactcgtgtccaggcacaaagacatgcagcaacgtcaccggaagatccaagctacccaaattgcaaaagtacgccaggagggaagcagcggcatagcacctgtcaaattgatggttcttggaccctctattaaggatgaccgctttgacaaagaccatgttcccgcaacggaagccggcgacgccattcttttcccggtgaacaagctaggaagctgcgagaaaacgcatcgagatttcctggaaacacaatgctacatgcaatgacacatctagtgtaaatcgtcctcggggcaacgtgggcgcgtcgtgaaagaaggagagcagatcgccggaaaaggagagaatgtcatcgttaaaccgccccccattcaaggcgtcgtaggatagtctttcagtcgactttttccttggagacgggttctagatagatacaacgttggtgatgttaaagcgtgctgattatgatgggttgaatatttgtgcttctcacctcgaatgagagagatatatttcagcacctcgtcaataagaagaacgggcgccgagatccacagtaccgccttccattcctgccagttcaacggggtaatttggaacaaggactgtagcataggtgaccataggatcagcgaggcagtcatggacaggtggaatggcatgctggagactcacgctcaggaaggggacgtagaggatgcagaagtgcaatgccatggaaagggcgatcgatgcgaccaggtatgggttggcccagagaggcaagaccaaaagagactcgttctcgctcagcgagttgcaggcgttgagcatctcgacgactagagaggggggcatcaggtcagaaagacggatggcatagccacaagtcagcccttatccatactcaccgacgaggattgacaatgacatggtcgtcgccgtcttcgagtcgacattggaaaacatttcacacccaatctcggggaatttgctcgagcactggtggaagttggtctacaggcaacagacggtcgacgagcgctcatctcatcagctagccgtctcgcctcgcaaagatcccgaatcgacgggctgactcacgagctggtgccaggtgatctgaggtccgccctcgtaagacatgaaccaccaagcgtaaccaaagacagtggcgacaccgacgtagatgccgatgaccatgtatcggaagaacaaccagggtccgacgagggcttcccttccgtttcgagggggagtcctcatgatcatgtgatcaggggggttgaagccgagagcggtggcagggagaccgctagacgacgagccaaacgagaagagtgtcagcccacgccgtttccaaaagccgacacgattccctctctacactcactcggtgaccaagttgacccagagcaattgtaccgggatcaacgcctcgggcatgcccaacaagacggtcaaaaagatcgagacgacttctccaatgttggacgagatcaagtatcggataaactgcttggtattgttgtaaatcgcccgaccctcctcgacggccttttcgatcgtggcaaagttgtcggtggcgaggaccatgtcggcggcgagcttggcgacgtctgtgcccgagcccatggcgatcccgatatcggcctttttcagagcgggggcgtcgttgacaccgtccccggtcatggcgacgacgagaccgagcccctgcaagagatccacgagctgactcttgtggttgggttccgtccggctgaacaagctggccctctggacggccaggaccttttgatgatgcgagaggtcgtcgagttcccttccggtgtacgacttgcccgtcaggtcctcgttgggcccgaaaatcccaatctcgcgacagatcgtctcggccgtgttcttgttgtcccccgtgatgacgatcgtcctgatcccggccgccttgcacttggcgatggcggacctgacttctggacgaggggggtcgagcatcccgacgagaccgacaaaggtcatgttctgctcgaacccgacgtaatcggccgaactgtccgtcttgtagtgatccacgttcgggtcagcctcgtcgacaaaggcaaacgccaacgtcctcaatccgcgtcgtccgtattccaactgggtctgtgccaacctgtctctgaggtgatccgacatcggcaagatcccatgtggggtatggaccgagctgcaccgttcgatgaccgtctcgggcgcgcccttgacgaacaagacggtctgtccctcgcgcttgacgaggaccgacatggatttccgatccctcgagaattcaaacgtgagcaatcgctcgatcttgttttcatagtacgtgttgacggcgttgactcgacccgaggggtgcatggcagcgagggtggaattgaacgcctcgtcgttggtagcgagtttctccacgaggaccttgagcgctgcctcggtgggttccccgaggttggtgtacaccctgctctcgtcgttgtaagccaccttggcgtcgttgcagatggaacaaatctcgaccaatctatccacgggagacgtcctcgtcatgtgtttctcggcgtgaagaccttcgggcgtggtgacctcgccgatgggcgcaaaggtggatcccgagacgaggtattccctgagcgggttggacgactcgtcgatcgtcaagaacctagcgaccgacatctggttggtcgtcaacgtgcccgtcttgtctgaacaaatgacgttggtacacccgagcgtctcgacgctgggcaagtttcgcacgatggcgccgcgcttggccatctttttagttcccaacgcgagacacgccgtgatcacagcggcgagaccctcggggatggcggcgacggcgagggcgacggcgatcttgaggtagtacaccgctcccttgacccaaccgtgatgggccgggtcgttgaagtgtcgaatgttgaccaaccagacgaggatacagatgacgctgatgaccttggcgagcgagtcaccgaaatcgtcgagcttctttttcagcggggtcttttccacgacctgggacgagatggaatcgtggatcgctccgatggcggtcaagggtcccgtgaggacgacgagggcgtgtgcggccccgttgacgacggtggtcccggagaacaacatgttggtcatgtcctgcctgacggccttttcatccttgaccttgccgacgaccttgctcacgctcgccgattccccggtgaggatcgcctggtccacgcggaacgagctgctcgaaaagctcaggacgcgacagtcggccggtaccttgtccccgacgtggaccgagacgatgtcaccggggacgagctcggcggcgtggatcttgtaggatcgaccggatcggatgacggtggcttcatcaggagagtattctttgagtgcctggtagacgggtcgcccgaagatgtcgatcagtccatgtcgctcatcttctgtcatcgcgacccgggtgaacactcacgtcgatggccttttcagcattattctcctgtatcacgccgacggcggcgttggcgatgaggatgagaaagatgacgagcggttcgacaaacgccgtcgcccagcttccaccggattcgctggaatcttcgaaacatgcgagcacgaacgagacgactgcggaaccgaggaggatgaggacgagttgatcttgaaactgagcgaggatcagggaaaagagcgacgaggacggttcttccggtaggactgcgagaggataaagtcatgtgcgagtcgacagatcggatgagccatcgtgtggaggtgcgaaaaggggaaatacgcagtgcttaccgtttttaccgtacaactttgcattctccctcgcacggtattcgtccaagccgctctcctcgctgacgccgtagtgagcgagcgcgtcctgtacggtatacgtccaggcgttggacaacatgatgttccgagaccgaggaccgaggtgggaagactgtgatgttcgtcgtggatgtgagggggggatgatacggcgaccaccgagatctacaccgtctaattcgtcggcagcgtcagatgggtataagagacaggggggggggaatggaccaatttacttccgaaaactcggtttccccgtttcggaagtaaattccggcgcaattcaagaccattcggaccgatgttgaccgggaaacaccaaccagctagccaacagcgacctgggaccctactcatctcactcctttgacctacctatcttttcatacatatagatctgaacgtctgcacttgcgactggtactttccccaaacatccaccgtcacagccaacagacaaatcaacctcacgtatcgaaacaatggtccgagtaatcaccctcgacgagccgtttctccccgttcacaatgatctcggtgaaggtcagttctggatcatttactagcctgtctgatggagaaaggttctcatgtaaacaatctcgcatcaactttaccttaggatgcctctgggactccaacacgggtctcttgcactgggtggacatcttccgttctgccattcacacgcgagtcatctttttgctcgcaacgccgacgagcctggtccccgacagcccgctgacttcccgtcctcgtccttccgccctggtacagtctcgatcccaagacgatgaaccactcggtggatgactattccgaatgcgacacggttattactagcttgattcagatgaaggacggatccggggtgagctcacgctactgggtgaacatccctcggtcatctcgctcagtccaccctccatgcgcatactctgggctacttacacagttcatcggctctcacttgaaacacctcgccctcttccccaatgctagcccgcctacccggccgtttccgaacggcacggtgaccaaacgcacgtctcagccgttgcagggggaccacgcgttcgagataccggccaagtatttcgaggcggggcaggatggcgtccataggtttaatgatggtgcagcagatgccaaagggaggttgtggtgagtttccggtatctcctttgtactcctttcaacttgatgataggctgattacgactgtatgatggactttgggtgaacaggatcgggaccatgggccacaaggaagccgagtacaacgggcacctctttaggtaagaggtgtaggctttgatatctgctggaagtacctgctcactgaggcaaggaaactcgataggtacgacccagatggcagcgtccagaccgttttcgaaaagattggcgtcagcaatgggatcggtttcagtccggacaacaagatcatgtgtgggttgtcttcatacgggaatactatcctccatatcagctaatacaaggggaactgtcgtccgggctagactatatcgattcgccgacacgggtgattcaccagatggattttgatctcgtgagtccagcgaatcccatttccggttcttcacctcgaatcgctgaaatacactcttcccacgtcggcaggaatctggccgagtctccaaccgccgaaccttgatcgactcgtcctcgttcgatgacggcgtgttcgacggtctgtgtatggatgccgagggcgccgtatgggccgcccgatggggggataaccgggtcgtcagagtgttgcccgacggtcaagtcgacctggagatcagaatacccgagtgcaggaatatcacgtgttgcgtgttcggaggtgagtaatccgcgtcaccggagagtctgtcccttatacccctttgctaaagtacatttcgcttcctcatcatcgatccgctaggtgaagacatgcaggacctgttcatcacgacggcttcgtgcagggataagcccgagttgaacgaaaagtacgctcagcggggtgacttgttcaaggtcagggtcgacggtatcaaaggggtggagaggttcaagtttggagcttgaaacaccgaaggtatggtgatgattttaggaggaaaagtcttgtaatgccaaaggaagcgaccatacacaagcgacaaatggcgggttccgcacacgaaaattcgcaaagtacttcgaggtctagatgtgataccatccgactcctccttctgtcgagatgcgaagggtagactcgatcaagtcatgagttctagcgtatggcgcgggaattctagctaaaaaattgggagcacatgtaggtccgcccacatttcagtctaggaacgcatgtctgttcagggtggcgacgaatgatcgaagcatgcatgatccaacaaaaggcgaagtacatacgggagaggtcgaatctgcttgcagagcatcgcgtcaccagtctgaagaagtcacacatatgtccaatgtcttgatcatggagtcttgggcccatattttactccccatgaggtgtgatacggctcagagcaagcaatatctttatcgattgaaaagagatccgcagtggatggccagacgcgtggcacatgtagacaaactatgataccacgcagcgcgagtcctccgactatcggcaccgcacataacgacccgtcgccaatattactcgctgagagttcggcttcgagaacaactgaagctcacgcatacttgctgtgggtacagcctcgattcctttacagctcatggtgttcgagatcacagacagctgagtggatcatctacatcgtggaccgcctcctctctgagccagtcagtcggcctggacgagtctcgagcaaaattgatatcgcctcccagcgtcttgtaatgaggaccagagtgaaacggctagtgatgtgtaaaatgccgtcatttccggttcaaagctcatgagtcgcacgttatcactacgtcatcatcgagcaagggcgggaggggcaagcatcaatgtttttgcatccgcgcaatccatcccatccgctctcgctcgctcgccatccgcaggggtcgtcaaaggaaacaagagacgaagcgaccccatactgcaggttcatcatgaagagagagccatattcgaccacctcaccaacctcgactactcgttttggtctctcaagaaccgtctctctcgcctccctcaacaaccacacatatcagtacgcagaacgcaacatgtccaatcaaggtcctcaactccgtcacaagacgtccgagccggccactggcaaggtgagacatcagatcggttcaactcgtcgcacgttctgcccgtcatgctgatcacccatgtcttgtgaacctggaaccgctgacagggcgcctcgatcgccgaagagagggaaaagcaagccgccctcaaagcctatgccaatgacgagggtcatttctcgctcgttagaaactttcgaatggccgacatcatcaccctcggcaacgccgtgtgtggtactctgtgcatctttttgtgcatccattacctcagcctgagcgccaacatgagcggagcaccgagtcaagaagccatgaggagcttgtactgggctcactttttgcccatgctcgggttcggctttgacgcgctcgacgggagggtcgccaggatgatgggtgggggcagtcttttgggacaagagctggacagtcttgccgatcttgtaagtggtcgtgaagctggagcgggtctttgaaatcgatcgcaccgtcaaacttcgctgacattgatggatcactcggccaaagatctctttcggtgtcgccccggctaccctggcatacaccctcggtatgcgtctcccgctcgatatcgcctgcctcttgttctttgtctcgggaggtctcgcccgtctcgctcgattcaacgccactgtcgctctcgtccctacgggtaaatccgggtcgatcaagttcttcaccgggattcctattccctcgagtttgggactcaccgcgttcatgtggggttgcgccaagacgggtcactttgtaggcgccaagggttggaccggtagcgtgggcgaggtcgcttccaagctgtcggccggcaagaacgccggagagatcgattgggcatcgatcaggaggttgggagatttgcccggtggaaccatcaagttgtttggcgaggccggaggtgtcggcgaggttcacctgatgagctttgtctttttggcctgggccgctgccatggtcagcaagacgttgaaggtcagtccaggatgaggtcgcgtgtcagaatcatcgatgttgaggtcctgcatctttgtcttcaggttcccaagctctagagaagcgacggagagtggtatgagaagtggcatgtgcgcaaaacgaagaaggtacaagtggagcgccgaatgaaaataaggatgggaagggtctttggggaaagtgacgtatcacactatatgaacacgataggacgtgtcgatgaataccatgttgccgacgtggaaccaaaggcaactcgtcagctacaattccacaagccgagagataatgtcctcctggggcagtcgcaaatcagcacagcattggaatttgacgtgacattgattgctgcgggttccccccttcctactagtactagtcgtcatccagtcacgtgactatttgttatcgatttctggcaactttccaaggacgacgagtcttagcccatccgatcaaccggcagtcgcctaacgagagagacagggagagcgagagagcgagtgggcgtaaggtgcagcaggtgcaggctagtgtgtgctagccaccaatgcgatcacctaccgaaaggtagaaccagtcacggtagtcgaaaggaagggtctccgttgctgtcatcgccgtcgccgtcgccgtcgccgtcgcgatccgctcatccttgccagctaaattccaaccccgctcttgcatgaccctatcgtccgcttgtcctcgcttgactttcgactgtcgaccaagggatgagatcaggtcgaggtactagtttagctaccgatcccgaccattcgacaatctttcacgatctcttaaagcaccacctcgactcgacgacatgatcacgccgcttaggatggccgacaataatatccctccagcacatgcctcggtgcaaccacctgcaactaccaaaagacggcccatcctcagctcgaccccgttctctgcaccattacgacccaccgtgaccgacattgacgccgacctgtcatctttttcgctcgaggtcacgctggctcacctggtcgatttcctagttcacaagctagagtcactctaccctcctcacctcatccagagcctccggcgtagcatcgtttcccacctcacccccaaactctcgccgacttgggatccactcaacccgtcctctggctcgggaatcaggtcgcttatcgccttgccaggcaagttccctacccctcttgtcaaggccgccatcgaagtcgggatcgaccctgtcaaatggacgagggcgatcggcgagacgggcgagtgggagatctgggtcgacccaggtagcgtgtgttttagggagggaggctgggcgtctgccgacgatgatttcgaaaacaagacgtacaagcgtgagtatccgctcggaaccaggacacgatccccttgtttcgctacgtcccgtatccacgtcgtatcgcgactgacagagatacctcgcacccttatcaacagaaacgttacataccgtgtggcatgcacctcttcctatcgagatctcggacgatttttaccctggcaacccgggcaatttatcctctcaaccgccctcatcctcaaacaccaccaactcggccatgaaacgagcgactgttcccatccgggcacctgccgcctttcgaatcccctcgtcacccatgccgctcgtcgaaggcatgcgttcattgtccctacgcccacccaacaacactactaccgtggccacgacgaccaacaacccgtttgacgtcggtcactcgaaccatcacaacctgcgtgaatcgagattagcgttcaacaattcgtcgtcgtcaatgatggccggtacagcaccgctgatcaaacgaagcttacctaatcagaccgtagactcttcgaacaccatcatcacccatggtgaatctgcttccgccgtttcgggtcccggttggaacgccacagggtcggccaagtcgatgccgctcaagggcaagaggatcgcaccacaggtcgtcgccatgcccatcggagacgccgccgtgggtgcaggcagacgatcggcatcccccgtattgccttcctcgctcgcaagatcgggtcacctctctcacatggctcagacgccccgctccatctcgctcgggacgcccgccaacgcttccgacctgctcgccctgctgaaccgcaagccggaaccactcaaagacgagcaaatctcgtttggaaagactcagcagccttctcaacctcgaactccgccgaaagcgcctggatcggcggtcattcctgatacccccggctcggtggctacggtcaggcctaggtcgccctcttccgtcgtcgctactgcaggcgctcccacttcgatcgcttcctcttctcctcgaaccgatacgacgaacagtcccggtactgcagctcgcgttcaaggctacgatggcgggaacgttggcgtactcggtggcggcgtcaagctcggcggtcagggggtgcccaagactcccaacgtcggtagtaacaggtccaggtccgcgtcgggcacgagcgtattgagtggaatgagcgggaaacggaccgtctcgggatcgtcttctgtcatctctgaagaaggatctcccgagtataagacgggcttgacatccccgactcccctcgaatccagccccgtgggcgggatcgtccacccgcatcaacccaagagacgccgaggaaggcctcagaacaggccatactttggtgcgtcctcgcccaagggtggacttccgcttcaacctggtacgggtatcgcggggcaacctgggtctggagccccatccatgggatcgccttacgcttatcatcaccagaacatgccttatggccatggtcaggtacctatcggtcgacctggtttcggttcccctcaatcaggtcccgctcatccagcacctctcgctgctagtcctggatcgcctggcaacgtccccccattacccgcttggaacaatgtcgggctcatcaacggtttacctgcgatgactcccaatccgggcggatggggtgtcaatcctgcggtgctcaatgtcgtgacacttcccatcggcggaggcgttccgggccagccaggaacgggccatccgggtttgcatcatcatcatcaccctcaccatcaacatcatccctccatgcacaatcatcagaaccacaacctccagcacagtcctaacaatcaacaaaacaatcatgccagccaccagatgaactcgcacgtagccaacgcggctgggatcaacgccgccgcctggaaccttggcgtggcgagtggtatgactactcagcctccagtccagggaggtctgaggcgatcgtgaactacacgacgctcgttcagactagtccagacacgagggtctagtgtgggcctgcgaaacatcgccaattacctgcgttacacaatgtcgtttcaccgtcccatggacctttcgaaaatttccggcttttccatcttttcatcataccgcctttcgtatattcgcattgagacgagaatcaagaatcaagaaccagcctccgacacgatcccttccgcaccatcttgaacggtcccatcgcctcgactcggcttggcacgtcaaagcaagacgaccgtggtgaacagagaatagaacatgcctcgaaatgatcgacctcgatctcaaacatcagcggacgcatgacacagacgcaaagactggggaaaacccgctcgtcggactcgtgcatacctacctatacacacacttacacacatggactcttctttcgtctttcggcgggttcgcatttttccttctcattttctcatacccaactacttgttgcaaaatcttcccggtgtattccatatagcatatcgcttgagcattgacaaagtgtcgcttcttcatatgggtggttgcttgcgacgagcaggcaggtcttgttttgaaagtcactcgcggtcggggcggggggaggggcgacgcgaaattaggccgtccatgtcaaaaggtaaacaaaccaccccggtcgggaccctcagagtcaagagtgatcttgatgatgttatggcgagacgatatgatatggcactggaatctcaagccaattcaccaacgagctaagctcctcggaatacaagagcatccaattgtaacacgaacatgtcggattccgaggacgggtcgacagccacgcctcggcaatcgcgaaggatccctcttcgtcaaaacaggaggtcctcggccaaacagaacggtaccaccaacagcccaggtttgaatgccaatgacgacgaggcagagaaaagcgctcggagggtgcaaaggagatcgacaggaaataacaggaggaacaaggagaacgaagacggcgaggaggacagcgatggacaggatggagacgaatacgcggggagcccggtaggcaagaccaaaggcaagccggctctaaaggctcgaagctcggacgcgaatggcaagaagaacaaggctgtgacgaagtcaaggttatcagtggtgaaccggcctgcgactatggtcacctccacatctgcctcggctactgtcgtttcgggcacaaccatcaatggaagcaccatgctcaacctcggtgatgtcacccagccaccagtgcaggttcctcgaaaggttatggacgacaatttcgaggagtggatgaagatggcgaccgataatgtaagtcatgagtgtccgggccgaaatcgctcgctccaacttacgccttgcgtgacatcgatcagaaaatcactgcgaacaacacttggggcttcgctttgatcgactactttgccgatattacgtttctacgcaatgccgacgacgatcaaagtgagtcagcttttctcaagacgactctcctccaatgtactgacgtgactcgctcgcgactcgctttcacaggcatcaattttcaaaaggcatcatgtacactcgacgggtgtgtcaaggtctggacctcgcgagtggatagcgttgcgacagagacaggcaagctgttatccggactctctacgggtcgccagaacgaccctgatgctctcgaagaggacatcgatcgggatggcggcgagggtgaagacggcgacggccagaggaagaagcagaaaaagtcgcgctctggggagagcacattggccaaatcattcgatgcgcttaaagtcaagaagctggatctcgagtttacagtcgacccattgttcaaaaagacgagtgccgatttcgatgagggaggcgcgatgggtctgctcatgaaccacctgggtgtcgatggcaagtgccgagtcgtttttgacgctggagacgtagggttcgaagacgaggaggatgaggaagatgacgaagtcgatgatgtcccggtcgacctggaaaagctgagaggtgagtttcatttgcagagtattttcttcgcgtcacctccgcttactccgacaactttccctcgctagaattcgtgcctgccctggaaaacgtcttgaaccggaacatttccgtgaccttggccgacttcaaattctcggccgatgccaagtccgcgttcgacgtctcgctctttatgcaatctcgagatgatgacgatgaccagcagctaccctcgcctgatggtaaccctaccggtgattctggcgcacccggacaagactttttcggagatgaggatatgggcaacgactttggtggaggcggcgacgggtactttggtgggggaggcggcgacgaagataatgacgccgaattcggggacgaagctggaatgggtatgggcgtgggtgggggatcgggtggatttggacctgccgaagcctttgaccctcgcaaacagagcaacggttccggcttgttcgtctcaatggatgacggacagggtatgatgctggatcattttgatgaagggtatctcaagaactgggccggaccagaacactggaagttgagacgggtcagacgaggtgcgtctctgacttgaccaatatcttcacaaccttgacattaataattgcctcggtgtacagatcctagcagtatgaccgctacgggagctacggccgctcggcagagaaaggaaaagttgccctttgtcatcgactttgaaggcccctcgaccgttacgacaaagaaactatttgaacccggaaccaagacggcaactaccttgcccgcacccaaagtcaagaagcgcaaggtgacgaaaggcacgaaacgcggcaaaagggtcaaggaggaagaagaggtagaggaacgggatgaacatctactacctgatgatatgcactttagcagtcggcagttgttgaggttgttcttgaaacccaagtttaccgtgagtgtgttgggagcgcggatgggagtcagatcttgaccgtaattggacctcgcgcctcacagctcaaaatgcgacgtcaaggcgcagtcgccaagcaactccaggaaggtaagttcactgaaatgttgccatgtgatcgacctctggaaacctgacgagaatggtccgatgcaggacacgatgcggatctggacgaaaacttttgggcgcaggcggcggctgaaaaggctgaggtcgaggctgctggcggcatggatgacgatggtcagccagttctgcgatgtcaagcctgtttcttcatcctgacgttttgcctctgaaccagacgatggcggtccaggagggttcgacacgcagttcttccacgacgatcccgatggcgaagattatgctctcgttgacgacggcattctgggcgacgacgtggatggggcgggtgaagtgaagcccgaggaagaggatctgtgggcgggtacgcaaggcaaactcaagatggctcgaccggagagcgtacattatgcaaagaaggccaaaaaggtggacgtcaagcgactcaaggacaatatctggaagggccttaaaatcgaagagaagccgaatttgcttgataagcaggtgggtgatggctcggcgtgtcaaggtccgaaagacgtgatagctgacgtggcgctgcagcccgatatggacgcctcggacgatgaaacctcgggggggctgacgcaagagcgagaattctcgaacgtcatccaggacctgcgaaccaactatacaaacgacaagatgtccgagatttcgacatcgttctgtttcatttgcttgttacacctggcgaacgagcaaggtctcaagattgaggtcgggaacgagggcaaattggaagctttgccagaagctgatgaggcacaaggtcagcgagccgaggcggtgggtgatctggaagctctcaaggtgtggaaggtgagtcggcaaaggcagacatgagcgaggacacggatatggtcgattgatagctgacgagatcatgcgatgagaccttgcaggacctcaacgccggcaaagcagcatagatataggcgtgtgggatgctgctccattgtttgcatcatgtacgacttcataatggggacgacgaggctggacttgtttctcggttgtaacatggattttggatgaatcgatctaactgtctcgtctcgctttctcacgcgttgctcttgaagtgatcaatctctcgctggtcggtcaaccccgaagcaagattttcttttttccttgtaacgaatctgcatccgcgcgcgtgactactcgccctttgtcgccccccccctttactctcgcccgctccatcaaaaagacttttaccaaacgatcgtcaactccttcaatcacaacttacttgacctgaaaagtctcccttctcctcaagcttctcttcgtttatacaaagagtctctcagtcacttcctactactctaaaaaaaccaacttctcaaacaaaaaaaaacaaaaacagtctacgttctcgaacgcagcaacccacacgtcctttcgactctacaacgcaaaaaaaaaaagatctatcagatccacattcccttcttccccctttcactctacacaacaaacaaattaacataacaatggtgagtagtcacgcggatgtctttgaacatggacgtgcttggtgctgaccacagcgacttcgaactcgcagtcttacggcggcggttacggcggcggcggcggtggcggcggctacggaggtggtggtggcggtacgtttctgaacaacctcatatttctcgattttcatcgcaacaccagactgatctcacctctgtcatctaggctacggcggtggtggcggcggctatggaggtggtggtggcccccgaacgtccccaccgcctcgaccgccatccctgccgcttcttcgtcctcgtccaaggagtcgaagaagaactccactcctgccgccgtcgctcctccggccacccctcccgccgtcaaccctctcgttctcggccggcattcactggtcgacagcgaagatacgaggccggcaaggccctcgacgtcacgacgggactggtgcacctcccttcgttgctgtgaacgggctcctgtggcgagctcctgaaaatcgcacctgacatcgtatcattcagggctttcggggaagtcatctcggaggtaatggcgacggcgaccaagggaacggtagagatggagctcgagagtggggagaaggttttgacgtcgggccgtctgctgctcgaagcgtatccgtacgctacaggcctgtgggtggcttttcacctatcaaaagcgagtcgagacgcatgacctgaggcccgaaacgaggacacccacgcggccgggacagacctcccggcagattacgtcgtggtccacgactgcgttcaggaagagggggtacgatttggaaggatacagagacggcgtgttacaagcgggaacagtaagtccatcgtatatgtaaagagcgttccacggcgctcagacatcgtgcctgcaggggggagcagcaatgttccgaacgttccgttgtctccgttgcgacccgtcgacgacgggaccaagcaagatgcggttcgagcgtcgaaaagggcgagtgacaagaaccccccgccgctttgtgattctggggacgaaacaagaaaagcgcacaagatgcgttgttgtattgatgatatccgccatgaagacaacgagaagccgataccagtctattcccgcttgccgaccggctgaacctggtcactccaccggctaactaggcccatagccctcgcccgcctgaccatcttccccacccgtctttgattcttccaggtgagtcccgtctctgctcgcgacttgatctttcccatctgagtcaggtagctaccgaccagctcagcgttgacggcttcgttgaccgggttgaccgaaaggatgtggaaaggatccgactgtcgagacttgggggccgagggtccaaggtaggccggcttgcgaggtttaggaggagctcggaagagcgagtcggatacaaggcgggtgggactgtaagtctatatgtgataccgcgggcgaataatccaagcggcgtcagctaatgaagtcatttcctcgcagccgttagacttacctgatggggggcgaatggacggtactcggcttgtcggacgacgttgccatataatgctgaaccaagaggcggaaagccgagttagaacaacgttccttttcaagcgacgccatgtacagtcttgggctcacctccggatcccgcgttattcgaagcagacctcgcctgcgactcctccgacttcttcaacgactccaccaagataccgctcagcttctctcctgcactgagttcccccgtctgtccagcggtcgacgacgatgaagcgggtgacgatgcagagccttccggtgccaacctgaaggcggattgatgcagagcgcgagttgctgtaaggcggaccgtccggaagctggctgttgcgagattcggcatggctaatgacattgtgactacgacgatgctagatatagcttctttctgctttggctgaagacctctgagcgttgtattcgagagagggtcgagcatggagtgaatgaacagatcaaaagtcgaaaggatggtaattactggccgatcgatgttttgggttgaatttctcggtgcaagacacgtcatgagaggataattctttgataaccgggagggtgataggcttatgacgaggcatccatcggaacagacgacgtcacatcaagtacaacttgcctggagagacaccttgtcgacttggaaagctgaccgctgcaaagacgtgaagtagctaccatacggcaatcatgatcctcctagaagtgagtcgaagatcgccgcgagaaggttcagtcagtcggtggggactgacgcgtgagctaccatttactatgaacagagccacaacaccatcattaagaatgtcctgaccgaacgtttcgtaaagtaagcccattggtgtcggaacggtcgtctttccaatactgactctagatccgcgtatgataggccttcaaagatcgacgttcagttcgtcgactatgacaatgtgcggttccacctctctaccccgaccagcaagaccgtcctcgtcctgtccatggggatccactgctggtcagatctgaagaagtacggtgctcccgagattctggagcgagaattcggtgaatgggtgtcgaatgatcccaacctgaaggaacaagactacgacgtgactctggttctcgatctagagaagatccctgaggaaggaggtgaggatgcgagcctgcgaagccgataatatagcacactgaagctgatcctgtccctatcaacttaccagaatcgcgtgatgcactcatcgaccacttatcgatgctcaagcctatcatcatctccgcacccttccatcgcgcctacagcgaacacgccgagcttgcttccaagcacaagtcgacgttccagccgggaatggctgatcaggctccggaagaacgcggagaactgatgatcatccactatcgagaagaggaggccatttacgtgcaagctgccaacgatcgggtcacgatcgtcatctcgaccttgttcacagacgagaccgatcgagtgtttggaaaggtctttttgcaggtcagtagtggtccgcttggagaggtggtgcaatggcagctgattcgatcaatacttgtggagtttaggaattcgttgatgctcgacgacgctcctcggctattggtaccgcgccgcaagtcatgtacacgacccgtgacccccctcttgaagttcgaaacgcacctggaattgccggcgtaaagcggtccgaggatgtcggctggatcacattcggtgagttcagaatgatgaaccagtgtatcgttgaatatcggctgaacctacgctctgcatcgtatagtgctattccctcgtcacttcgcgactcccgagatcgcatccgacaccaccttcaagctcgaactcttccgtgattacctccactaccacatcaaagccagcaaaacgttggtcgatttgcgtctcgatgcttcatagtcgtgccttctggactaacatcctctcctgcccacaacagctacatgcactcgcgaatgagagcaagagtcgccagcttccagcagatcttaaacagagccaagccggaggtaattcaggaagagaggaagacagcaacgtaaggacgataagacgactcacaggatagatgtcgatggatactgaccgcgactactcgtctcctcacagcggccgtaccttccgcagccggtaatttgccttgtcgtgtaccaccctactttagttcgttcgtgtgatgatttcaatatacaattgtatggtgatgcaagacacgctaccatgcgagaacgtatgcggcgagctaccgtccattcctgtctgtctgcgacatccatcgctgaactctctagtagacttcgagccatcatgtcgacgacggcaaactgagcggatgtaggtacctggcatggagtgatatcgtgattgcttccggtgatgctgttgttcgccgacatggaaaacgaaggtgcaccttcagcagtgacatcctcaaaaacatcgaaattgcagggtaatcagcacaccgcgagtcccgcatatcatactggaagagcatatcctttattcgggcgggacgagctctgagtaagagcagacttcagacttaagcttctcctccgttgatgcctcaatggggatgtacgtcgcttcctgtctgctatcatagcgttttcgctacgagtggttcgaaacagccaaagagtttttcgcatcgaaagactgatcatcgtcagtctcgtttatacaaggcctagctttcatattcgcctggtgagagtcggcacacaatgccgtgttgcatcacaatatatatatatcccgtacatagtgcgagacctgatacaacgagtgtggtccggggcgacaccagtcgagaggcttgagttggcaagctcctcgaccggtgctcacttcggataggttccatatggcgaatccggcacgattttctggtgcctgaaggtgtagtcaggactacgcctctgcgcgatcttggttcatcatcatttggcttcgctggggtacgaattccgatcgagatctctatagctttcaaaaagccaatcttgtctacgcgaacaggcaaggcgcgtcattgcggatgtttagaaaaggtcgaggtttgcccgggatggcacaacgcgtttcacgcccttgttgaaatgcttttcgagcgggtatgtgaacgcagcgtttgtacctattagtaggtgtcgtgcaatcgaatgtaatatcaagtaaaaacgtctcagcttatgatagacgttcgaaacctgaccggtgccggtcaattcggcttcaatgatattcctcgctgcggctagcgggtcgaccggaagcaacgcgtgcgtgaaccttaatccgacaactgatggtggtgttcaggacgtagggtctgtcgagtttgtatgtaacgatactcgagactacaagggaggcgttaaccttcatcgtaacattcgcatcataatcaaatgcctctggctgagccttggtcgaagggctgtgtgcacgcgtgcaagcccaagcccatcgaaggatccaggtgccatcaaaactctgacgcacctcctctcggagggaggtattccataccgagcgtggacggacatcccgcacaagaaaacgtaagtcttcgttcagagggctgcaggccccaatcccgcattaccaaaagccattccttaagctgagcccatccgcattatactgcagggagcttatacgagtctcgagccggccgttcttcatggagtatccggttgtaacgggtacgtgcaggtcgacgagatcccccttgagatggcaggctagtttctaatcagattcacgttgcgccgtaccatacagccacattctgcatgctgtggcaggcttgggagaagtgcggaagctcccaaacaacatctccgtccatcaggcgacctcgcccgacctggccctacgacaggccatcgtggacgagatcggctcgttcgtctacacgtcattggctcaattaagagtctacgatattaagctggacgaagggccgaatttcccattcgatcagtcaaaccagccatttcggtccttccatgcggtatgggattgctaaatatcttggctctctcagctaccagcatttctttctattcccgagcgcagcagcggaaacgcagcaaccatgtacaagcgcttcctcccagtagtgccaatctacatggcggctgcaatcttcgtgccggttctgagtatgatgtcccggatttcttgcacaaagtccgcggtcccagtaacatatccgttgtactgcgggctcttccccgaggccatccctaaattggccaatgaaggctccctcacataatcgaaatgtctcgcgatgatctccatttcaaagccttggtcaagcctgttccatagatccgcacagcgatcccttcgtgtatcgttgcccaggtcgtcctcgatcaacgagatgatcatcagagtgtccatgactcgactacgggattgaagtcgaaatgccgagcgcaacgccggcttcgaataacgttcatatctgtcgagtcgtccttgttcccgctgatagcggagcatgatggtgttgctgatccatatcacatcgtcgtcgtcagagcgagtgatctgtagacccaacgtaacaatcaggcaaatagcatttgatcggcagggcgacctcttacctcgaaccataccgactcgagctgtcgagttgcgaatgccaacaggctctgtgctttctcgccgttctggcggaaggggttggtgctaccttcgagtcgacttatgacatgcgctaagcgaacgattgcggtccgatgcaatacccaatgttgtaaagatagtgaaatgtgacttgctttcagtaaatgcggtagagccgctagtggagctgcaccatgtgcctgtgtccgtcgtgtacattaggaacgaccaatgaagaacattaagcaaggtgacgactgacttctgctgcctcagctctggcaagtaaacccgtcaggacatcgatcccccggcgcggtgaatccatagcatcacgttcgaacaagtcgtgagacaatttctgacctggatcatgtagtattcggagtggtcctccagctccaagttgacggtagctactctgaggcagtcggaacgttttcacgaggtctaacatatcgtcctcttctctgcgaaacgaccggattttagcagaaagtcaccctcacgcccattgcagtactgaccttctttggagatcctgttcgagcacatcccatatcgcctcggaccatttttgaaaatcggcaatggtcataccctcggtaagatgaggatcgagtaatatagctagcgcttcactcgatcgcgacgctttcgtgtactgcgaagccgtactcataatttagcatgagaatcggtcatcagggcgaaaaagcatctcacgcgtctcgagcgacccatagctactgcgagactgatgtctgtccgattggtagatgatctcaaagccaagtcctcgtgaagttcagccagcgtcggcgatcctgttcgtttccagatgtaagggttggcgcatactagctcgatcgtgagctcttacccatcatttcccacaagccgctctgtaccacgtgtaacagcccgtcgtccatcaggctaccttctggtatctttctgtctttgatttcctgttcggattcaggttccacaagaccggagttgatagctggtttaggtccggacttggcttgcatgatcgattgctgccttgctatcgcgcgaacggtctgtgcataggctgttggcagtgactctccctaggcaaggggcaggtcgtctgctcagccagataccgaaatggcccgaaccatgtatactcactaaatctagtcgctgttttacagcccacagctcgtccaaaggagtttcgtctacggcgttctcccccacatccgatgtatgtacgggttgtccgggcgccatgacagtcgacattgcaggttccgactcggctttcagccgcttggcgagactgagaccaggttctcgtcagctgacagcatcacaatcctgcgccccatttaatgcagaacccacctgagacaatgcttgagacactgtgcgtccccggcagtacgtgctcctctgatagcttcatctatcgtctgagatcgtcgtggacatcaggccagttgaggaggaaggtgacaaattcaatactcacatctttagccaattctagaccccctgttgcgtaatgataggaagccagctgaagtagcgcatgatggtgtcgcatcctattacacaagattggaggctaagcagtcaatcgatgaatctcgagcaacctaagtctcacttgtcgtttggtgggaatcggtggctgtaaaatttctccagtgaagatagtgcaagggaatagtcgccgcttttgcaagctgtctggtatctgcaacgagacagctgctgggcaaatctctatcgtgatgtagagaagtcttcacacttactcttgcaagacgctcaatctagtatcgagcaggtcatccatctccgtgacttctgtggaagtgaggatgagagttgatcagacatcgttcactcgatcatttctacagttcgatatacttgctatttgcgactacccgacgctttcccttcttcatgctgtagccgtatccgatccctccatgtccgttccatcgctgctcatcttccatgtcatcgtgtaaggcgtctggattcgctgaccacccagagaccaaattctgagcatcggacgagtttgcctgatcttgcttttgagctctatcgtcttgacgtctgaagctcggttcaggatcaccggcacaccagctcaagacgtcttgccggacgatgagagattgaggaaagttcagaacccggtaagctaggtgaactttgcgcagaaatacgcctaggggcgagtggtaggtctaaacgcagaagggcatggaatcaatcggggaagaatctcgatgtagaccgagtgaagttcgactcacgatcctggtctccggagatcctggaccctgagaaatgacccgcataaccgtgatcgatcagccttcctggcttgcgagagttagtaaccggctgaacatacgtcttctggtgtttcgtagcaggcagccgggacatctttacgggtggatatcacgaatcagcagcgtttctcctgtcgctcttgaggttatccacttactatcgatcatttcgaagctttgctgcacgtcgtcgaagatctcaggctgtctcgcaatgagggtgagctagggcatgcagagcagaggtcgaaagtggggactgaccatgcgattcagctgttgacagggccttttgacgaactcgtcttccttgttcggagcgagatccagcaaccgatgaaccttttcctgcaattcgaggtatgttgagggttccgatagctatcggaacagactgctttcagctgtcgatacgccgtcatccattgccttccagacccacatggaagatctcgcgagcaagcatgttcaggctttgctgaacgtatgcactgttcttggtaagccatttgtccgtctcatcctgagagaccttcatgggcgggaacaggttgagaatgatgatcgccagagcgagagcatgaggtgtcggcggcggggttgagatgtgagcgatggtggactcgtccgcgggacggggcatcgtgaaggtccaaagatatcagtgatccggagtaagtgctcgagatggtgaaaggtgctcgagtagtactttgagagcgtaaagcaagacccagagttatgtgatcacggcccagcaccgataatccggttgttgactttatgagggttgctcgggcatctacctgctaggcggaagctgattgcgtaattcaaatgccggcatcgatcgttcttagcttgtcactcccgctcactcgcgaaaggtgggtgacccaggacgacgacgtcacagcagcgagggattcaagtgaccaaagtgataaataatatgttgatatctcgacccctagatagcctttatcctacggctctgaaaccttggtacaggcgcaaggaccgagaacataccacgacaaacagctggcaaaaccggccaggtagacttctgggaatcaagcatcactggctctcatcacgttggatataaccgcttggctggattctaaactcttggacaaagcgagtgatcaccgaccgatcgttcgcggtttgacaggatgatctcggtcagtagccagcgtcggaatctctccgtattgaagcctctggtaccaaccgacctgtcatgtttaccacctcaggctttcttcatcttcaatcaaaagggagaggtcagccgagccgtggctggaaatgtattgcgtttgataacacaggctgaactacatcgactttccatcaacctacaggtcctgatttcgcgactgtttcgtaccgatctcaagtgagcaatcggcaatgcaattctcaacgtgaaccacaccggtactgatgtgcctcagcggtctctaggcgatccatcgcagacgtgttccgaatacaggtcatctcgaacgcagacgtccgttctcccattatcaccctcggatccacctcctttttccacgtccgggtcaacaacgtctttgtactcgccgtcaccaagttcgtaccaattgcgacaacctcgtttcgacgatcggccctgacctatcttcgtaacagatgtaacgcgaatgccgccctcgtattcgagcttctgtaccgcttcttgagcatctccaagtcgtactttaacaaactagacgaagaggctgtcaagaacaatttcgtcctcatctacgagcttctcgatggtgagtgtgaacacgctgcgtcgtcgtgcttgctggtctatcagggctgaaccgaccgatctttgtggcatactgcagaaattctggactttggatacccccagaatgcggaaatcgacgcgctcaagatgcacatcacgacggaagggatcagatcagagatggcagtggtgagttcgcgtcgaaaccctgctcaggctcggtcctgctaatcaggatgtccgatcgcagcgggaagactcgtcaaagatcacgattcaagctaccggagcgacctcttggaggaggaatgatgtcaagtacaggaagaatgaagcctttgtcgatgttatcgagtcggtgaacctcttgatgagcaaggaaggcaagtcttaactcctcttcgggtaatagttctttcgtgcctgaaagctgatctgttgatctcgcggcgaggcaggcgcgatcttgcgggcagacgtggacggacagattatgatgcgagcctacctcagtgggactccagaatgcaagtttgggcttaacgataagctcgtcttggaaaagaagtacgttagctggctggccagcatcgttctcaagctggagagatgtctgatatcgtttgtaccattacaggccggaccgagcacgatcagacaacgccgtcgagctggacgactgtcagttccatcaatgcgtgcgactgggcaaatttgatagcgatcggtcgatcagctttatcccgcctgacggcgagtttgagcttatgaagtgagtttccactgcttgaccgcagcaacgtgatatcgctaatccacattgctcgactgcagatatcgatcaacaaccaacatcaatcttcccttcaagctgcaatcgcacgtagtagaacctactaaatcccgcgtggaatacacgatccagctgcgagcaacgtttgaccccaaactcaacgccaacggtgtgatacttcagatcccgacaccgctgaacacgagcggagtcaactgcaaggtcagcatgggcaaggccaagtatgtacctgcggacaatatgatcgtatggaagtgagttccgatgcgcgagaggaggtctttgatatcgatggtacggactatcgctaacattttggtctcacgcctcgcaggatccctcgtatgcaaggtgctcaggaagccagttttcaggccgaggccgatttggcgaccacgactgtcaggcaagcatggtcgagaccgcccatccagttggacttttccggtgagcccgcagtcggcaaccactagtctcgagggtagctgaagcggtcgatctttcgatatttcagttgtcatgttcactgcctcgggtctcctcgtacggttcctgaaggtattcgaaaagagcaattaccaatcggtcaaatgggtgcggtacatgacgaaagcgaattcaacatatcagattcgagtgagtcgcgttgaaatggcctgaagtctgccgatcgcgtcctgatccatgtcctcgccgtgcctaatcagttctaggaggtagtagcggtccttgctagttgatcttgtatcattccatcgtaggttgtagccattcgatcgaaattctcatttggcaacgcgatcgtttgcgtcgtcggaagcaaagccgaacgacgaaacgagccccgcttctttgcgttcgacgttgtctcgtcaaaccttattttcggtctggatcgtttggagtccgagcaaatgctttggaattcgatcggggcgtgacgttcgggtgcagtcgtgaattttctccatcactctagctttgttcgttgatccctagtggacaagatggaaccaagagagatcgtcaaaagtgcgattgatcgtcggtcgggtgtgtgagtacccctcaatcgacgaggggcgaggatagagtagccatcagacaaccgtcgatcttgatccacgtctactctacttctctacatgtacctacttgcctcgcctcttgtctcgtactaactattactattgtgtatcgacgatccgagaagcatacagcaaaagcaagtacgcaatagaaacaaatctgataaagatggacgaacacgttcccatgaacatcatgaggaagaaaccaaggcctagccactctcccctcccccacctcccccatgcgggtgggggtagtgattgggctgggggacgaagatcgaggtcgaggtgcagtacaacccagcgcggatcagttcaggttcatgtggttttcggtcggtttaccagtagctcctcgtctctccctgcctttcttgaaattcggctttcctgactcacatgcagattgccgtccatccccaccttcctcctccttgtctgatcgctgttcctgagcgttctgatgataacctctccgacattgcaacgtcttccgttggtcgtttgtgctcgtgctggccctcgcgtgatactgggctgaggatgacgaatacgctcgtctggctacattccccctccccgcgagaaaggtggatgggaggatgatccgtgttgatcgtagtgttgtgtgcgttggacggcgcattcctagtcgagtgggtgagtggtggtgacggtcgtggtggtggtgatgatatcgttgtcaataaaatgatgtgaggaggtagtaagtaggtagttcaagttggtagtcaccgaaattgaacgttgtaggcgggcgggtagctagtagctagctagctggctatggccgtggtgggtggtgagattgagatttccttaaatctgaatgtgacgcgtgagaaacgcgaaaagcgacaacgagcgacgcggagaacgacgaggcagaagcagaggcagagaccacccaccatcatcatcatcatatgtacgtacatcatcaaatcgatatcaccatcaaccgccaggtcaatcgtatcttccctgaacctagctcatcctcaacatcgtatcgcatcgttcgatcggacctatcgaacaagcacgctcgtcgtaaaagcgtccatccatcaacgtatcctcgctttacactcggggaggatcaaaggaaaccagaaccaaaccggtcgaccacaaaccacctcgaccatcaccgtaacgcctcgtcctccgaacgcgtttgactaccgacacacctcgatcgggaaccgacaggggatcactacgagaaccactcggccaacttggaaagcgacgtatatagcgaatccaggcgtacccgagtctaagcagtcgaattccggcaagactcgacacataacattcatcaacactagccaggactagcgcgcagggcgtccccctccccctttccatatctgacctcacctcatcttactttttgacgaatcccacaacacccccctctcggtttacccttcttggatcccgactcgacttcaagccatctacaagccgatcgaagtctgtgacccggaacccgaatccggagaacgttcgaactaagaaccaaagacaagacccgacccgacccgacccgacccgacgtcctacataccgcgtccgcttccgacccaaaactcgactcaacgctacgaccccgacctagtcgagtcgagtggaatcttcgacccagcgtctactgttctctttatcccggtttccggctctgacgggatctatcgagagtgaacgcaagagtcacgtggacggaaaaactgagagggaacaagtccggaagggaatcgagtcgaatcgaatcgaaaaggattgaattgaatagaaggagaagatgggtcagatttctagttgttgcgggtgtgagtagtcgtgttttcctctttattcccttggttcccttggttcgtcatttcgttctttctcgggcttcgtttggggatcgcgccggcgttcgcaattccggagatcggatggccaggatcaagaattacgataaggacttcggcatggtcacggtcgacctcggatctccctattgaccttggtcgacgatcgacaatcgacgatcgacgataacttcttcatctgttctcggtcggatgacatggttttcgactcgcggaccccgactcggatttgctttcgaacccggactcgggaagatgaagctcgtaaaccttcgtccatccgtgccggagaggcaggggcgagggggaggagagatcgagctagatgagatcgcctagtcgacgatacccgtctgcccgtcttcttgctaagcgataacgacgaacgggagagcagtaagggtgggagaggtcttgacgcgaggacgagaaacgaggaacgtgggactagacccaatggcggttggtcggtcccgctgcattcggagcgggtcgactggcacgtgggattttttttgcgttgctggtgcttgaaaaaaagaaaaggccggcacgtcgacttttcgcctgatgctcgtcgactgggcggggtcgggcgcgaaaggagattagcagagctacggccttgaaccactcaaatggcgtggacatgcgattcttcctgtgaatgggacgagaatggctgactcttccctcttctccctgtggacgatccgacttttcttcaaacaggtggttcagcgcgtaaacagtcgtatgaaccgctcttgctcgaaaacgaacgagaggccgtcagtgaattgttgcatcacctcgagagtgagtgtggccgcgtttcaccacgagcgtgttctagaccaaagggaactcacgatacggccctgttcaccaccgcgtgctagaccggacgacgaccaactttttcaccggttccccgctcgcctcgttgaccaccctctcgttcagcgataatgtcgacctccagcgttccgctgcgttggcattcgccgagatcactgaaaaggaagtacgcgaggtcggaagggatacgttggatccggtcttgttcctcctcggaagccacgataccgaggtccagagggcagcgagcgcagcgttgggcaatctggccgtcaatcgtgcgtagcagtgcagtgatcaagcaaagtcaggtcgaccgccatcaggctgatacatggatcggccctgatgcagccgagaataagctcttgatcgtcaggctcggcggtttggagcctttaatccgacagatgctttctcccaatgtcgaagtccaatgcaacgccgttggatgcatcaccaatttggctacccacggtgagtcgatggcgcgtcgaggtggtctcgagtcgagactgattcgacggtgcgtgtggctctcgttgttgcagacgagaacaagaccaagattgccaaatccggcgctttggtgccattgacccggttggcaaaatcaaaggacatgcgggtacagaggaacgctacaggtgctctcctgaacatgacgcatagcggtaggttctaggtcgtccgtcttgacctagtctcgggatcgatcgacctgactcgtcttcaaccgcacagatgagaacaggcaccagctcgtccacgccggagcgattcctgtcctggtcggattgttgaactcgcctgataccgacgtacagtattactgtactaccgcgttgagcaacatcgccgtcgatggtgagtcactggcaagtctcttcgacgcaagcaatcgcactgatccactcgactatgctgccgctgcaggtgccaaccggaaaaagctcgcttcgacggaacccaagctagtgcaaagtctggtcgccttgatggacagccccagcctaaaggttcagtgtcaagctgctttggctctgcgaaatctggctagcgatggtgggtaaacccatagccttgccctttgttacatgccactgaactttccctcatcgtctgatagagaaatatcagctcgagatcgtcaaggcggacggtctgacgccgctcttgcgattgcttcactcttcttaccttcccctcatcctctcggcagccgcttgcgtgcgaaacgtttcgatccacccgaacaacgaatctcccattatcgattccggattcttgcaacccttgatcgaattgctctcattcgacgaaaacgaagaggttcaatgtcacgcgatctcgactttgagaaatttggcggcaagcagtgagaggaacaagacggccattgtcgaagccggcgccgtggaacgaatcaagcagctcgtcctgcaggcgccattattggtgcaaagcgagatgaccgcttgtgtggctgtgctggccctcagtggtgagtcgaccgcgccaaacatttgcaacgcgttcgcgactgaatgaccttttcggttttccagacgacttgaaaccacaattgcttgagatgggaatttgcgaggtcttgatccccttgaccaactcgcagagcttggaagtccaggggaacagcgcagccgccctcggcaacctgtcatcaaaggcagcagaggattacgcccccttcaacgccgtatggaattcgccagaaggcggtctgcatgcatatctcgttcgattcctcggtagccctgatcaaactttccagcacattgccgtttgggtgagtggcatctggacaaaacgcttgttttggcataccgcttaatgtcgtcgacgcaaatagacgatcgtacaattactggaatcagaggacgagaccctgaccaacaacatccgagcatcgcccatcctcttatcccgggtcaagcagctcgcagctcaatcgcccggctcgcgatcgcagggtagcagtcgacgcggatcgaattcggacgatgaaggcagcgctggcgagaatggcgctggggagattgccggacttgccaaaaggattcttagtctgacagaaggcggcagcgaactcgagggcgacgaacacgacggcgaacatgctgaattgagggctagcgtacaccaagccttgaacggtcagccgcactaggtagtgcgtacttgaacctcctcttctacctcttctccttaattataccccacccggccctttggaactcgttccatccccaatctcgttgatcaaaacccgtccgggccgcgaccgcccttcgacgttaccgcttttcgaccctcatgtacgtcacgattcgtcatgcccaaattggctctctccgttatacatctcttttggctgccctgaacatgtacgtagaacgatgcataacatacacagaacatagtaatgcacaaaaggacatggacggacaaagggcattgattgtttttgtcagctcctgtgtcaaaggaacgtttcagagtcgtcaaaggggcggcagaaaccagggcgtaagggggacagcaacatcaggaatgcgatataaagctactcgactcgaagaggcctacaatcgcatgcctgtcttgcggttctcacccgcaaccctatatcttcgaaacagaatggctccatcagtgccgaatgggctattgctaaacgtcaccgttcagggatcgagtaccggttgctatctgagcgaacgggcttttcttcatggcattgcggccggtttgatgttggctcacgatagtctactatggtatattccctctggtcagtcgttgtactcacataccgtcgtcgtcgtcacgcttcgtttactcagcattcggccgactcttgctcgatacgatagtgctgagagtgcaaggaacgcttacgtcccatgactctagcgaggtgtggaacacgttgatcgtaaactacacacttctcgcgcatctcagcctggcttatatcgtcttcagccacgttgataacaccatttctagatggtcgccatcatcaggctgccggtggcaaaacgtcgcgatcgtggtgatactggagggcgcgtttgcaacatcgtgggcttgtaagcatattcgcccgacttgctaatccgaaagctgaccctcttccctcgatcccatgacagacttgttgtatcagaactttcctctcatggcaacattcgctttccacgaccgcacctggaaatccctgagcccaatcatcctcgaaaacctcattttcgttacctggactggaacgcttctgcatactttggtcccagctctggacgcagcaacccgaggattgcgatggtccgacatattcgaagtcttcgggatggacatccaagattacccatggttagcagagccacgcacaggcggtatcgcattggcagatgacgaattgatggaggaagttcctttggatcgaaagaatggcattcaccttgtatagcattatgccatgaaacgaattcgggcttatgaagggtccttcttgctatgtgatacatgctatggtataagctgggcgctgatgcaatgtgatatacaaccgtaaaacttgaatgactgcgatagagacgccacgatacgttctcatggctcagacgatgacgatgcacctggaccatgatcgcccttgtgcgaatgctggaagattgaagtggaaaaggactcctgcctgactacagcctgcgtcaatcctggtctcaaccaacaccgaagaatcggtgacagattgaggcccaaagcgtagacagtacacgcgccatagagcactgggacgattgaaagggtgacccgagcgttggctccctgatgcttgtgaatcgcataagcgactgaaggccacacccctccaccacagagggctgttaccagccctgtcgacgtgagacgtgtgtggcggcccattccccgaagcgtgatggcgaatagagtcgggaatactggggcctcgaagaagaaaacaatgatgcctagcgcgatgggagccttgccgttaggtagcacgatcgttaagatcgagcagaccgtcgccccggtcgcgcaaatagccaggaggatgcgtggaggtaaccccgagaagcaaagacctgccgccagaaatctggaaaaggagaagatcccttggccgatgcagcgaaggttgaaggcatcgctgagaagggacctaatcacaagtctcgttagtatatacaatacgctgctcgaagtgaggactatcacacccacccttgatgaaccagagtgacaaaattgaaccaatagtagctggtggcctcctgcgctccaatgtagaaactcattgtgacgattccggacaccatcatcaaccatttgaccggaagcccgatcacacgcgcttctggtgagatcccggtagatcgctgtcggtcatccgccaagcgttgcaaggtatcgtcatccgcctcgttgagaggcagatagtaaaagacgacgctcaaagcgatgactgccaggcctacagccagatagcaccattgcgtgtcgacgagagaatctcgactctgtacgcttcggaagagcgctttgtgggccagaacaggcgatatgacgctggcgacgccttgaattgcttgtgcaaagtttaggcgcgcttcactgagctcatccgggccagcgatagctacgaaaagattggcggcgacttccaggcaggcgagaccggaagccaacagcatgttacttataaagaaccctggtcaaggcaaggatgaaacttagcatgtattcgaccgagaaatatgactcgatagtgcatacctggaaaggacgctatcacgctgctaggccagaaagccatggcaccgcatgcgaacaaccacagtccgcaaataaaggtcgccttgaatggttgagttccacctctactcaggacccagtaaccgatcaggggaggcgcagccagataccccacccaataggcgctgtagaaagcgagagaccttcccgccgaaaagtcgagaatgtcttcaatttgggcgtttagcgaaccaagcaggccgtatgcaaaaccccatacgaagaacagaatagagactgtgacgacggcactgatgagacaactttcgaatttaatcctacaaggccttgcgactcaccgctcataatgggccaaaacgcctcatttcgagtcaactccgtgagcggtttggagctggtcaaattgacaaagtccgagaacgcagtgtccgggccttgatttcccgccccggtgatggcgctacctagggtcaaaatcgtcatgcgtctttttctgggtggtaaaggcgctgattcgggcttccgaggatgttcgcgcgcagacagctcgttgcatatagccgcgggttgtcgaacggtaacgaaaccttcgtccggcagtgcatccttctcagtgctttgacctgacggtctcctgtatcccaacccttccatatctgcttctgagagagccaagaagtccatgaaatccatgtcgcccaaatcgaccttgcgagttggagcggcttctcggtccggatcgaggcagaatggcgagatgctgcgcatgaggtttggtgctgggtgtattgagtcgctatcacggtcgtccaaagcctcttcgtcgatcggctgcaggtcgtgcataacgccctgtcttctcaaaaccggatccgcttctgtcagatgaaacacgggcacgctcttctcctcgtatgacgatgatctccggcgagatgctagattgaagggcccatcacgatctgcggcgtggaggtctaatccaattttggatcccgcctcgctagctgaagcctttcttgtgcctttccgatcggatctagctgtagtgggcgctccccacgctttcggactgatctttttcatgagtggtttcaagaccaggacctgggtgtgatatgatatcaacatgattgtgtacaccaacgcatcttccttgactttaccggacttaccgatgcgcaaatcaatcccgtattgacttcgaccgcgctccacatgtatgaaaaactggcagtataaccgaaatccgtaggcctgttggtaccagtctcatccatcgtccggtattgctgatagagcgctgtgttcaggtaggcgatccggatgacatcgacgactgcgacgaacaaccccgtgcaaaaggttccgaccacgacgtatttctgcttccgctccatgcggattcccgtgaggatcgggaggggcaataggacgatggccaggtcggtgatcacgttcactggggcactgcagaggtacaggtagacgaggttgatgcacttggcttctccgggtgcgaccaggtggagagcagccgagaccggagagcattggaatatgttcaggaaggcgaggacgatgccggcggtattgaccagtaccaagagaaagacggacgcccatcgaaagaatgggttcgcctgagacattcgcaggtagaggatgaggatggatgatttggtggccatcaagaccgggttgtaactgattgaaaagacatattcggcgcgtttgaggggaagttgccactctggaagtatgtctgcggtggtgcggcaagagatgcgtaagcgtgaatccaaggctgtgcggtagttgattcaagtcctaacctgtgtcccgcaatcctagaccatatcgagccgcatacatggtcgcagttgataacgcgaaagcaagagcctgtgggtgtacggtacagcatcagcgatcaacatcgcgtccgttgcgattcgatacatcctcttacccaggcgattcccatgagcccatcgtcccaatcgatcttcttgacgatgaagagcctcgagaccatccgcatcccaacgaacacgctcgccaacgtgaagaagacgagcgtgactgcgaagactgcatcacttctactcatatcggaagactaggctgtacggtttgacccgatatatcgtagtgttgtgctcgggcgacgtgagaccatattgtcgtcgtatgctgctggccagatttgcagtcttgcggccttgtaaagatagactggagttgatatttcggtgcatcggtatgtagatggaatggagtattcatgtctctaagagtgataaaggctgcttgtcacgatcgcctcggttccaaaaccaagcataggatgcaaggtcgtgagagcgctgagagcgtaagcgtgaggcaggtgggcagatgacaaggagctctatcggtcccgttaaccgaattagactccgtaattactccacccgcagcgtttgttcctgatcgatgaaccccacagtttacgtacgcagatcccccggtctattcacggggtctattccgcgctcgacgcgaatctaggtcgagactgctggtcacaggcgacaggccacagggcacaagctcacaagtcactggatcactggcttttcgaatgcgttaaaacacgtttcaacgagtacacagcgcacatggagtctttcagtccctgaagagttttgcgtattcaacgactgcacagatgccgagacatacgtgagaccgccattaaccaaattcctctgacaacgcacacatcgtgctactgagggaaattatggaatttgcatgccagaaccaaatgaaaacgctcacatttctcgattttggtagagaccatatactatttatatgtggcatcaaaccattcgtagtacagcggcggtctctccgtatggatacgagacgaacttccaagctcgcacacgtagtactgtgacttgatccgtccattctctccgctccttccacccctcatgcgcgttgtcttcaaattccttccaagattcccattccatccatggtacatcttggagtatggcgagcagcaacatataggacttctcgatttgttccagctcttccgatgctactgggagttcgtagtatgaaggtacatacattaatcgcaatcgaatgttgaactcttcctctaccgatgcgttaatcgaaccaatcaacgctttgaataaggccgaggtcctttcaccctgcgccttagagtactcctttctcatcacttctagccctctgaggtactcattagcgctcttaagaatcctgctgcgttcttcgcgatgatcgtcaaaatacctggacatctggtttggtttgccaaaaatccagctccttaaaccatgatcccattgatccatgtccgagttcaaatccgcggcagtctgcagggaccgaagagtggcatcgttcgcaatgaccttcgattccaggccgtcttcgaaacgtattgtcggtcctatgaggctcggagttctcgggtcaatgcgatatgccttggcggttttctcctcggctaccccttgttcaatggcttcgttgctttctggataccgcagtaagacagtcccgcttcgaagctcagtatagccgtttttctgtgagaactcgtaatctgctgaagcaacagacttctcgaagatgtgagggtttaggatatgccaattaggacacggcaaggaagaatcaatgctatcatactcaccacgacggaagagagtggggcagtcgcataggaaagctcagagacatccatcttgcggaagctcagtgtctatctgtgtctagctgtccagtagtgaccagcattccgtacacatcctacagaatctagagctgtctatatagagctatcgccacgccatcctttgttcatggtgaatcgtgaatgcaagacggcgctcttgcttttcagcacgtaggatggcatcatctttgtactactcgtcgctactgcatctagtcgaggtccgttcctttcatcctatcaggtgaccagtctaccaaagaagtatcacacgagataggctgtcgagctgatcaccagtaggctgctcgcggtcgtcttgtgaccaggtcgagttggatcgggctccgtcactcctgcacaggatcccccatgtttctaggcaggccttccggcaggttccgtgctgagtcggacgttctcaaggtcgtgatatcataccaaattactggatttcttgccttgtgggaatacgcatacggaaccgtcttatctcaagtacacttatctcccaaaagccatcgaggtcggtcagctgaattacccttacgatgtgacgagcgagaagagttcttcggttcatcgaccgatccagtggtccggtatctgaaccccgttctgtttcccgttctgtttcttcgtcgacatccgacgacttcccgagggttggtggttgacctttttatatgtgcatcccatccagtcttctcggtcatacagcatgtgatacaaacctccctgcctacaatgatcggatctactttttctgctcgtcttcctctgacggaccaggttgaccgatcgatcccatcatattctgcaagttctactcgatgacgcccgacccaccggattgtcatcagctttcccgtttggttgtggtgatgatttaccgaagagacagagagagggagagtatggataaggggccccccccctttcgctgaaacacggccggatctcaactttgtccctcaggcgctaaatttccagatgagatccccccgatagttagcagctcgatcgacatctcatcccctttcctggctggttggatgtttttgcttcggaaagggcacggcacggcttttgaattgacactgagcacgagcgatgggcctggccaagattgagatgagcattgcgggactgagggatctgggggatgcgaggggggattgacactgggtcactgttctgactgaacgatggtcgatcgacctttttttgcatgggaatcgtcccattatcgtcgaatccccctgttgcgatgctgaccgagctcgggcaacatggttttgatgacctcatggtggattacttgcacttgactatctccctctgactttttttcccgctcgatatcttcccgatcctatccccgcggggcttttctttcatccgcgtcatccattttcatttacacgcgcgcaatttcatggccgagaaaaaggtcggtgcgattctctttcttcgtctgatcgtctcagaatacatctcgatgatggtcgaatgccgtcagcaagtgtaggtatactaggaatcggtcggcaccggcaaccctcacaagagtggggacaggacgataattcgacgccgacgtgataacaccactactggggaatgattcaaaatgtagtggctttacactgcccagaagtgactgactgccctttctcaatttctcgcccgcatcatcgatcgccgcgcgaaaagagaaaaagatgagcacggccgccctccgccgcctctgccgcgctgaaagacgaggtcgagggcgggacagacgcagacgtcgatctcgtccaggcagactcgtccaaggtcgacgtcgacgtcattgacaagtgttcactctaatatatacgattcgtggtggcccattatcgaccgagtgcgagtttgcgacgttgatcagttcgtggttcatcccgtcatcgctgtcgtctgaccgtttctacgtttctcttgagcggacgtacatcgtcgttccctccctccctcccttcataccccgcacggcgccatctcgtgagtggaggtgcgcgaaagaggaagacgaggaccatcagcctatgcccagactgcagacgaccactacggccattgctgaaccgaaggtcaatcccaagccagtgtgacgtcgccagagaacatagagggagtaaaggacaagtcatccaatcccaccgccccagtctcgcaaagacataatcgcatgactttgtccatacacatctaggaacgaggacaagttcaatcaggatcgtctcaaacattcatcctcttcctcgtcgtcgcgacttggacttgcgacttgcgatctgcgagctcggccagcggctagcgtcaggacatccaacgatacttcggtccgactttgagtctatcgaggactgccccttgtcaaaatacaaggtcgataaactagtcaaggaatcattatatcatcgaaataggatcaatctaggaggttgtctttggaaggaccacgccgatcgtattcgtcctactttatattcccaagagtcaacgttgagatcggagattcgtctcgaagaaacgaaagtagggagaaacagagggcgctcgtgatcgaaaagaggatagtgagtagtactggacgacaatctgcagatatcaaaggatacgtaggtgtggaccgtagtctgacgtcaacctgcacagaccgtctggtccgatcagaatcacacgtacaacgaacacccactgcacattcctccaagcctttctttctacctgcaaaaggactccagaccatgccttcactcttcgctcggcatcggcacacccggtccacggacaccaccacctcttcccctacgaacccagcatcatccacttaccaacccacccacttgagaaaaccttctctcaccgacaacaatggtccccctcctgccgcctcggcaatcgcttcgtccggactcttggggaacctcaaggcgaaactgaacgcttcacgtgtttccttgcacgaggacgacgcgttcaacgggtcaggaggagcgggggggaagaggaggttctcgatcggacagatcctcatccccaaggatacctcggaggggggtctgaatggtggaaggagaaactcgatcgccatgggtgcgggcaacggaacgacagcaggggtcgacagctctcccacgttcagtaggaattacccaccggggaccgtagtcatgcctaccccgaagacgagcgtcgcggcacccggcgtcatgcatgagggggatgaagatcgacaacgaggcagggaagccgccgatctgctcgatctggatcaggatcaagacccgaacccgatttctaggctgaatcaggcgaccgcgacgaggtcgggctcgcagaacgggtcgacgggtcaggccgggttggacgcttggaaaccgctcgtacccgatttcaagggaagatcgttatccccgcccacttcaccgcctatatctcctacgccggtgagggtgatcagcagtacaaacacgacgacatccacgacgacgacgtccccgagaacgaaccgggtacctcctggcaggatcgccttgcctcctcccggactcatctcacgtaaatcgacggcgtctcacgggatgggattgtccatcgtaccctcgactccattgcctcaacggatcgccaacctgccgacactgaacggaagcgccagcgggacgtcggacgcttcggccaccccggggtatgggttccctggtgccaacatggtgaacggggtcggcagtgggagcggagcgcctatgcaagggtcggcgtccaggccaggaagcagtcacggtggagccggaagcttgcagaactcgccagggttgacgacgaggagcgcttcggacgcgagatgggccaaaaaggccatggtgagtcgatccgggtcgagtctctactatgacgaatgcgattagctgatggtcaactcgatcgacccagccggtcatgctgcgagaaccttctcatcgacccgtggcacccgtcgtcgcttcgcccgaacaagaaggatcggatgattccgattcccaagagtcgagcgagtccgagtctgggtccgacgtcgatgacgacgacgatagtagcgaagagggagggtcgagcgcgatgacgaccagggcgccaggcggtcgcacgagtctaggcgaggtggaacagcgtggtctgctaggtcgaagggagagggttgattcgatccacgaagatcccgaagaggatcaacaggccgtctcgcctggggaggccaaccgtcgtcgattggccgccctatccatcccggatcgaagacaactcgttgctccgcgcctcgatggactgccacagaacctggtgagcgctcagagtcaagctcaaactcaggattcgaccgcccagatgccatcacagtcaccgtcgtcttcttcctgggcactgcccacccctaggacgcccggcgccaaccaattcttctcgggtggagctggctggacccagtttggtgcggctacgccgacgatcgggaccccaatgggatctcctacggctaagacgcctgggcgggctgccctgggagcctttgccttgccgaacggagtggccaaggccgcggcgctgtcgaggaatcagacgcccgccgccggagtcaaggtagacgagacgtcgtatttcgacactgcgaggcccgtcagggatgggaatgctacgcccacgccgtcctcggctcggccggtcgactcgaatgaagacggggaagacgacattgaagaagtctcgacgccacgtgcggaggaccccgagtcgttgtccagctccgctacccagccgccggcacctgtcacggtcgccccgttgccgatggacttgtccaatttgccgggaatggttcccgcaagtcgagatgaccaggtcacgtccccgattcgcgaaacccttcaatcagaaggatccgctgctggcagccgtccgacgaccccaatgacgtcccgtccgatgatgttgaaacacaggtctcggagcatggtcgacctttctgctgcagcatctccttcgtggcgacagccggccgaacccgtgtcccgtcgtccctcggcagaggatgaccacgcggcatctcccgtcgaaccgacccaaagacacgaaatctcacctgtcggaatgatccccatcggcgagagtttgcgggaacacgacccttcgcccgcacccagtacgaggtcatcggcggactgggctcggcctcctcctacgcccggtatcggcatgacccagccgtttagattcggcaccgccacacctagcggcacatctacgccgatcacgccgaaaaagaccgttatgcagcgtcaaatgtctgacgccaaggggtcgcctctgaagcgaagacggtcactcgacgacacacgggtcaagccgcccaagtacgaaccgcctgagccgcgatcaggtattccgggaccgagggaagaggaaggcagagagagtcttcccgagtattggtgtcacgtaagctgattgcgagcgggctcagtttgttcggctactcattctcactcttctcccgcccgcaggtccacattgaaggctacctgccgcgcaagatggagttctcggcacccggcgttcaagcgagagatagaagctggaaacggctctactttgtcctgcacgggacctcactaagggttttcaagcacgatgtgcacaggattccgttcaaggatacttcgtccatctcgattccagaggtgtcagaggccgacctgagcaacctgcatgtgcacaagcccggcgaaaggcgtgagtcggtcagtgcggtcggtaccgcccgtccgggcgttccggccgctgcgaccggacgtcgaggttcgctcgtcgagggtagcatcaacgcgccaatgggccgacgtggatcgctgcccggctctgatcccgacgccatcagccctgccgctcgaaggacgtcccagagttcggtcggatccagcatcgctacggcgacgacgacgacgtcgagcgaaaaggatatgtcactgttccatccggtttcccaggccagacgcgctagcgtcagcgtccccccacccgcgccttccagtgggatcaacgctcgagagaacattgcctcgcacctaccctttggaggcgggaatgcgatggtcaaacagtactcgctgcaaaacgctgagagcgggttggcagcggactacgttaagaagcgcaacgtcgttcgggttcgagccgagggcgagcagttcttacttcagaccgacagtgccaaagacgtggtcgattggatcgaggtcagtcttatcaccttgaaattagatcgcgggccgtggttcgctgactagttgtcctttttcacgcgcacaggcattccaagcggcgacgaatgtctcgctcgagctggatacccgaccgatgcccaagatcattaccttgccccgacgaaggaggaggagaaggcccggcgaggctgctgcgggagccgccgctgcccagcctggagtcgccgaaaacgacgatacgccagagggtgagtgtcatagtcatgccgtgcccggaacggccgtatccgaatgcaagctaatcatccacgacctgatttttatatcataggcaacgctcgagcggtcgagcaggccgaacgtgctgctgcggctgccaatgccagggagtcgaactcccggaacgtgaacgccatggaggccatgctcgcagaggaccaggcggcggcgtagccgtttcgtcgtcgatctggaatagaaatctgtatccccttgcttggccactcgttctttttgctttcgtggttctcctcttctttctgtctatgccgtcgaattgtcacctctgcgtttgtatagcatgagcatgtatgtaacaaggaattcatatacgatcaaagccagacttcttgttgatcaagggccgctccagcaatggccttttgcctcatggcaagcgtgcggaaacccaggctaggctcggtccgcacatacaccgcaaatgaagtgggccgagtttttaacagtgtatgatatagcgatgcgaaaggtggacataagtctcatggaaatttcagtcatgcttatccttgtgtgattgatatctatcctggtgcggcaaagtcgtggctgtatcaagccgaccgtgattaaaacaaggtttcacctgccggcagagctgattgggaacattgcctagggaatacgttgcatgtcgctctacttactacggggagcgaagactggcaagcggcatctctctcacttgactttgattctctcagtacatcgagcgcactgtcgactctcggcaggatcacatactgtcccctaattgtgtttggcacctcagcgcgcgacaaccgttctcatcacaacaaccggatagaaagacattcccgctcaaaattccagcgagaatacaccatgccaatcaataagctaaacatcgctactagctagtaccgtaatgagtcacaataatatcttgtcagccaaacggaccaccgttcctctgacgcgcttctggttggtagctgctgctcaatcaaatgacgcgctttctggcgctcaagatttggtaatgcaatgccggcatcagatcctcaacaacagagaatctcactcaaccattcctcgagcgagatgctctgagctacctagccagctcccggacaatcccaacatcatcgtcgaccacgttcatcttcgaatcgatatcagcttgctactgtcaggtcaagatctctcgatcagctcatagcctacaagtaagctgttgatctcgacccgactctcaatacctcatgcgatagcataccgggaaccctgccgaccagaagcgaaaccgtgccattcaacaaacaacaacgatcgcgacgtgaggagaaatgtcttccgatacgccgagatcggtattacaatatgtaggaggatggaagttgggtgcgacgctaggtcgaggaggttttggtgagcttgttctcgctggtttgaataaagcctgaaattcgatcgaagctgatccgaaactttccggtgatccgctacctaggacacgttcgtaaggcgaagcacctcgccacgaaccggacgacggcatgcaagattcttcctgctgtggaccctacatctcccttgaccaaggacatgatactcgacgcgatggaggcccagaaagaggagatcctgttgaagttgatggccggtttgaagattgagggtgtcgtcgggatcgacatggtcaggcacgaaaagcagtggaagtgagttccgcctcgacgagcctttggtctatactacgcaccgtggatgttgactctgatcatcaccttgcaggtacctcttccttcccatgctgcctcaatcggccagcagcattcgctcccccgtcacccccgaacgcatcatcccctttttccgacaactccttcgctccctacacgccctccattccatcggcgtgtggcacgaagacctcaaaccggccaacatcctgatgacagacacggggatgccagtcttggcggatttcggactgacgacgttttcgcccaagatgagaaaggccgtttcggggggtgggacgttggactacatgtccccggaaaagatcgaggtgggtcgaccgattcgtgttggtcgaactggcttcggcgctgataccctttgtgtcgtctgccagaaccggccgtatgatggagcagcggcggacgtctatgcctgtggtatccttctttacaagtggctcaggaaccaccacccgttcatccgggaccgagggaacgatacggatgaagtgatcgaggaccgtatcatcaagggggaatgcgatttcaagatgacgagagagccaggctcggcaggggagttgatctggaaaatgatccgaggggatcccgtgcgacgatggaccgtgagtcgagagaacgactcgatgctgcttgaagcttttgcaaatgtgtgactcgtacgaatctaatcctgattctgggacggcagatccctaaagtcctcgcgcatcctttcctcaaccctcctaccttgctacccgaaactcctttcaagcttcccgtcgtcgaccagacaccaattcctaacccttctgcgcacaccgtgttcgagatcacatttctcgcgtacatctcgaacctctggtacccttgccagactgatcagagtatccgggaaaagttggccagcccgttccctcagtgggaaaaggcgatgtatcacgcgatctcggcttggaaggccaaggacccggacgccaacaaggacatgacttgtgagtcgaggaatgtcgcgattatcaatgcgagacgagtaggctgactatcgacgagcacgtcatcatactcgtgatagccaaaccgatgatgaaggcgttgctgcgcgttttgagcgagaccaccatctctgataacgtgagcacacaggttgaggtgtatacactgaaggtccggaccgctcatcgggcgttacgatggcagaaccccgttcaacctcaccctaccgccgatcgactggcctcgcccgacaaaaaggcagactctcctctcaagcccgcttccccgagaaaagcggacttcccactcatcctccaaggagcacgacccaacaagcctacttcgagtatcgttccctcgatcacgaagacggacaaggagaacgtggtcctcgcgctcgaagcggcaggcaagtcggggggaacaggacctgtgcaggagaagcagcatatcgtcatgcaggataagactcagaacgagatgaacaagcagaacgacaaggcgatcgaggccctgtgagtccctgggtcgacgtgcttgtcaagcgaggatcgatgactgaccctttccgcaccgtatctttacgtcgcagtgcacgagcgaaccaggtccaggccgagatggcgagaaaggaagagtgcgaggtgatcgatttgttgtcggataccgaagatcaggacgagatgcccgtctcgcctgtcaaacctgtcgacatcaatgtggccaagtcgggcgtcatcattgtcaaggccaaggcgaatgtcaaggcgaccaaggcgaaacccatggcaagggggaagaaaggcccgacgatcaagctgaacgacgatgaggttgccgaccaggacgaggagaatggcgagggtaagcgcggagatggtcgtccagacaagacactagattgcaaaagctgatttcccctctaccgacacgcggtagatacgatctacctccctgcgcctctaccgaaacaacgacatgccccgcgacgttctccgcgtttacgggggatcgcccctgagaatgtcggcctgaactttgaacgtgagtgttcggcctgaatgatcagagtttgtcacatcgagaacgtgtgagctgactggtgagatttcgtttggttcaaattcgatagcgagagccaggcgaacccggatgatggtctaaattgatcacgcatcttcgtcgcgtcaactctgttccttgcccccctcccatccctcctactacttcgatccgtccatcctgttgttcaatttgcgaatcattctgttttaatgcgagctcgtatcatttttcgagagtgtacttctagtgtagcgaatacgaaccgatcatcaaaatgtccttgtgattcttgttaactactttgggtgatcgacggcctcccgctccctcatcgggcatcgccgcctaacagtcacgtgaaccacatgggtcacattcagaagagtctcgctcgcttcgttatctcgggagttgatcgagactctagccagtcagagcgaagtcgacacgggtcaagtagcaagtagccatacataggacataggacgactatactcttaaagcatcgtcgagcacaactgagcatttcaagtttggaaatacggatccaacaatactcaaaatcctgcaagcaagacatcacgatcaacatgaagctcactctcatctcgtcggccatcacggtcgccgcatgtatatcaccacttaccaacgctcaggcaaagtacgttcatcgcaaccccgtcgagtcctagtggaccgcttcgtgctgatcgttccgagagctcttcagtcatcaatatgcttatcaagctccattgcccacggcacacgctgagggtgagcttcttttccgctcgatatcgctctccgtctcacctcggagcccatcccacagaaccccatgcggcgcctgctttcggattgcaactcgcacagcatcttcagggaatgacagggtacaatatcacgggcatgtataacaaggtcatccgttcgaaagagtttgatcgagcacaagacgcagtggacgggttcgtcaggttgacggatcggaattacaactcgctcgtgagtcctcgactcgacaggctctctctcgctcggtcgatcgggggtgtcctgccacagtttacaagttcaatggctgactcgggtgaccggagtcaggtcaagcacgagtcgttgccggaagggggtaaagagcgggtatggttctcgatcatgtgagttccccaccctcttgcttccccatagacccaggccggatcacactgatcgtctcgcctcgacacttcttgtactgcaggcacgccccgccttcagacgtgacctctagcgcctacctcgacgcgatgaccaacgctgcccgtatcgcccgggcgaacaagacggacccgctcgaccacgtcaagtgggggaggatcgatttcatcaccgagacggaattggcagcacgttggctcgtcttcaagcaagtgtcgtctactcggcgcgacccgaagctccggcggtctgtcatattgcaggtgctgacctgatcggcgatattcgcgtctcccgcttgcagaccccccttgttcgtcattgcgtcaaacagggggaaagatctccggttcctcaccccgcgaatggtcgccccgaatgggacgacgctcgagacgattatgcgggaagaacactggaggaacgtgcccatctggaacagcgcttatgctccgggaggtagtcggtgagttctttcgtgggcgtagacgttagaggtggtcgggtggactagacctagctgatccgtcttgtcgggtcgtggcgtagcgctttcgtggtggattggtatgtcaagatcgtacagttctggggcagaatcactacgacgatcccatcatggtaagtccctcaagcgccagccaggtacaaggacaaagcggacaggcatagctcatcctcttgtcacgtcgtctgggatgacagggcattgttgatcatcatgcccatgatgacacaacagatcatgagttggatgcacagcggagcaccagctcctacccctgcggcaggtaggccagcagcggccatcgctcccgcccctctggcagcaggaccgcgcaagggtgtggacgcgaagaagaagaggaagtagatatgaaagcgaaccgaggcagtaatcggtagatcgtgacaaatctgcatgagcataagtataggcatagacatgaatgatcggtccatgtgaaaccccctgagagggctgagcgcttccataggaggcctgagagatgggaaggtattcatgttcaccagagtcctgatcatcttccgcggatcagtgtcaaatcacccctctctggtgtcacgtagaaaatcctcaacatgtttgcgagagagatggaatccatcgcgcggaaagcggtggacgaggaactcgcctcgctcttgcacggcgagtcgcgccggtcgtttgggatcggatcgagtttcggcggcgggtcgacatttgattgagaaagagagagagagagagctcggccgccgcgacggtccaagctttcagttttggtgggcaaagtggagtttcgggttgtagaaagggaaatcgattcatgaggttgtatgggtttgagacagagacatcattataattcctggcagacagttccgtgattccgcaacaagaagacgcgacatcccgatgtcgacgtggacccttgatctgccttggtgattacgaatatccgcttcgatgaagcattcaaacgttcctccccgggcgagctggcatcaagccagaaagtgtgaccatgccgtcgcgtccccatctgacgtacccggttccacagacctttgattagcattgcatagacaccgctatatacctacgtatgcgtctacaagaagacgcgtcgtcttggaaacccacggaaaccagtcgagatcggcaaggaatattttaggaccctcggtgaacagctatgtagggtcgatgcggcgtggaccgctttgagacgggtttttctctccgacgagagtttcccgagaaatatggccgcgatgccaagggcaaaggggcgggcaaaggggtggatagggatcttcccaggagcaaaaaaaagagcaggcattcaagatcgatcggaaacacattgtcgtcgtcggcggggtctatttggtctgtctccacttgaggtgcctctcgtagaatttgagcatctgtcatcgcatgcgggtcagtcgtcgtcgtcgtcgtcgtcgtcggggttgaggggttcaaacttgactgactttttggggacatcggatgttgcacgtctcggcgtcctgagccgtcttttcacctcccttcctgtaaacgcgacgtctgcggtcagtaccaacccacgcaggagaggcgggactgggcggcttgcatgatcatatacacgaccaacttgtcgttcgcacccctctcgaccgtctcgatcgacttgatgtgttcctcccaattagcaaagtctgcgtagggggccatggaatccttgtgatccttgctaaacgccgacaattcgtccgcctcgggatcttcctcctggtccgtgatcgcagggacggcggcggtgcttctccggccgcgtttcgaagacccagcgccgttggtggccgaaggagagtcgtcggctcgacggcgcttggaacccgtgacggatgagcctgctcgtttggcaggatgttgtttgaacggcttcccacccatcttttgccagtaagcgtcgatcatctcgtttgacccgctggctcatacaatcacgtcagaacgcgtcagcccagatctcttcccgagtgacatgtggacgaccgtcgtcctgaccgtccgaggaaacactgacaagttttcttctccgacccattcgttgaattcaggtccatatccgacccacgagacgaggtctatcaagagcgaaccgaagcgaagcgaagcgaatcgaactcgaaccgaaggaatgatcgtgacgatggtcagcgttctctatcccgttacgtccgcggatgacccaggtgcccgggacacgcggcaagaggcagaaaagacttgcattcgaacccggattttccctgtagtttccgggggtgatgtcgttatcgtagtccaggttcaggtccatggtcggaggatcggtggtcggtcgttcggggtgggagagacatgggtcgaacaggtccggggacgagcggtcgagagaaggatgcgtggtggataggtcaaacgggatgaaatcagtatcacgcttctcggatcctggtacgacgatcctggctgagaacgtctcgggggggggcaaggtcctcgtccctttcacctaagacggatcccccaccccccacccacgaatcttcggaggtccatcgtccaaggctcgactagccgctggctcaccttgcccgtcaacctcttattatccaagatggcctcgatctcatactcgccctcgtccaacccgctctcgtcgtcatcattctcattgtcgtcatcgtcgaccttgtcctcgtcgttgtcaaccacgacggcgttctgctttgcgtttgcatcatcctcgacgatctggatatggtcatccccgtcgttatcgttgttgttgttggtggtggtgttgttgttgttgttgttgttgttgttgttggtctcctctactgctttgggctgatcgtcatgggcgtgttcgagctcgtcctgttccccagaagccgaagccgaagccgcaggagctgatcctccggcgttgtcgctaccttcctgagcttgcccgttggtagcagcggcgggctcggcggcgacatcgtctacttgcatgacatcggcctctccgtcatctccctcggtgccctcagcggcggcggcggcggtggtggcaggaagggtctcgccgtcgaggtcgatcggggtcgtccccttcttggaggaagacgagacgggagctacgctacgtgatgtagaagcgctgcgatttgacatggtcacgggacgagatgaggcgtttgagtgacgagtggtgagcggtgcgtagagcgtaacgctatgacgagatgagatgaggttctctggtgcagctggtggtgtttgtaagtctgaacgaggtaggttggggtggtagttgggtagttcccgcgcgtctcagctaactaattgactagggacgcgactttaatagatgacaaccaccagcaccagcaccagcaccagcaccatctcgcaacgagcaacgagggactcttcctcgaatacccatgcgacacacaatagtagctgttagtgatcaatctgatggtgacctacatgtcgttagcgatcagctacctgttcatacggttttgattgcgagtttgaacgttcgaaataagtatcaatccaaattgatcattcctcattcgtcgttcgtaccatcgtcttggcatcgcttgcatcagctctgccgccttggtacgaaaggcttgagctttctgcaggaagtcatcatctacaccctgctgcaaggtcctgggacatgttgtccgagtgtgtagttaattctatacatgcgaccccaatcaacttgcaacttgcaacttgcattttaccgcggggccgagcctcggctttgtgaaattcggaacgcgcagtcaattcgagcgagcgagtttctccacatcaacacgcacaccgactagacttgggaccatcgacgactcggcaaaacgacacacacacacacacacaccaaaacaaaagctcacgacccaggatacgaccacgtacgacgagatacatacttggattgtatccgtgacgacaatccgcacgatcgcttgcacgctcctgtacacgctggacgagctcgacgtagcgtgatcgttcgttcatacaggaaacccgacgtggaccgggacgactaccgccgagacgaccaaaacgaaaaaagaagggagtgagcactcttggatcatctactgctcgggaacttcaactagagcgattcgacccaaagtgttcgaggctggcggatctgtgagaatacgacacgtcgatcgactgatctggacgacaagctgtgctcgtagtcgactctgattacgacgagcgagcgagcgagcgacttctcaagggctaccctctcgagttcgctagggatcataaacccgggcgattcgctacgataaccgggctgaaggatctgtgaagcacgatgatgaccatgagctctgctcaggctggacctcgtcccgcgatgaacgggattgacgggtcataccgatcaggtcaccccgacagtgggctcgaccttgatgccgatgggttcccacgacaacctcctcctgcaccaactcggtccacgaacatcgtcccacctgcatcatcctcgtcgagaccgcccgacctggcatccgagcccgacctgaacgaagcaccgacggaacctcctcgagcggggttctctttcccggcgttgcacctcggatccttctcgtcactcaagatggacgatttcgcaaactttcccagttcgacatcattgaacgacgataatgatcaagatggcaggacagggaacgtcagatcctcgacacctgccgagaacgatttcaacctcgagcatgatggcgaaccggactcggtgaccaagggcgcgtcgtccacgttgcccatcacttccgggggaaacttgcaacgtgtgatctcacctctcggtccggccggtgcgtctgcgagctcgcccaatggcaagacggcgagaccttctccttccctgtacgatgtgaccaggatggcgaggtccggcagtccattccgtccggtacccgcgccgacgacgacccaggacacctcgatgggacgcccacctcatcaactctcgaccgatcaagcgctcgatcaggatgtcggccaagactcggacgtcttcctcgatctccccgttcgagcccacccaccagcgaataccggggattatcttatagactcgccgggattcctctctgaagaaggctcacaggcattcttgcgtcagtcgaggatcgctcgtcgtagaacgatcgtacaggatccaaacgggcaaaacagggacggcgaggacgacgacggtttctcgggccaggtgagaagtaggcaggggagtagggatatggggttggacggaccagagggcgtgcccagcaggaaggcctcgacggtaggccagctggatagcgtcgatgagatcacggcaagtctcgtgtctctgcagagaggatcgtcatccccgcgtcgtactgatcgtcagatgttactgataagcagcaggacgcacccgagcttcctctgtcaaacggcctggctccggccataccgccatcgtcacccaacgcgcaagcccgtcgaccgagttccgatgcacctcgacattcgttcccaagctcgctcgagccgagaagacgtcggctcccgtcagcgccttcggccaggtcgataccaggtctagggtcgtcaggggaggacagagaggaagaggacaagcagcgggccgctcaagacgtctttgatcaggcgaacggaaacgtttcgctcggacaggcgatcacgacggtcgatcaaccagaaggacacctaggcggcaaggctgctgtgagggtcgcctcggggtccgatcggcaccctcgaagtccacccatgccgtccggacctctgcatccgggcatctcgtcggcagatagacccccgatcgctcagtcgtattcggcttcccagctacagcaagccaatcacggtccttcccatagcttgggtccgcgagccgaagacatggatagacggaaaagtctgaatccaagctcgaggacaccgccgagagcttatgctgctctgcctcctatccaatcgcaggctaatacggggatcaacctggactcgatgccatctctaccaatgttcccgggtctaagcaaggatgaaggtccgtaccctagttacgctcgacctcgacggagtacggatcgagatgacaattcgatccgccggatgagcgatggcaagattgtgaacggacgatatagacccggagaagacggtccaccgcttcgcatcaaggtacctccaccacaggaggagatctgcctcgaatgcctcatgcgggatcgcgatctcatgcacgtcgatgtcacgggtgaaggcgtctgggaacgagcatccgacgtcgactggcaggacaggctagagcgcgaagacatgtgcgtccagcaattcagacgggatccagagaataggaggaaacgggaagaatgcgaaggcgaggcacgggcgaggttggagagcatgttgttgcgggaggaggacaacttggtcgaccaggaggttggctggcgagggttctcctgggaagaaggggagaacgggaccggattgcccaagcatttcagaggtcacgttgagggcgagttgctcgaggagaggctgagagagttggcgaccaaggtgggatccactggccagagacaaagctggcatgagatcgatgctgaccgtcactatgtcggttgtccttttagatgaacgcgcccgccgcacatcggttcaaaactctgcaagtatatctccgcgaccaggctgcatcagtcggtcttgtacatcccatggcgcggcgagcagagatggacgctgccatgtctcatcagagcatggtcctcccctcgaatcagcctccaccggctgtgcggccgcaggatctggcggtgcttccgccgcatcttcgtccgtcccagagccacggtatgctacaagagccggtagatttccagcgaggagctccgactcggagggttcctcagcatgggcactatcttgaccctgttcagagggccaccatgtatgcaaaacccgctgaagaaccggtatacatgtccggccaagcctctgcttatacccggagcaagacgattccggcgatagccctggggagccctctgcctgccggtcgggacgctcctcactcgagggctccgcctctacagctcgacctgcgaaagggcaagggggtctcttctcccgggttgctcgagggcatgtctcctgatcagaacgcctttgacgacgcgatcaacgaccgctcaagtgggaggtatgactcgggtgaccagacctcgatatccgattcgccgatcagacccttctcgttcgctgtctgggcgggaaacggtggtcaacactcggcgaggagcagccctggccccggtcgagaccgacggaacagcagcgctctcggacgatggggaggcagcgtcaccagtttctttggtggcagtcaaggaggtgctagtggcagcatgatggatatgcagtacgtaaatgcagatcgatcacgacacggtagcgacactaaatctgttctacacctacagccttggccttgatcaagatcgtcgtcgaggcctacgcactgtatcaccactgcctcaacccagatcggtctcgatggcttcaccgcctcgaccaaatttcttctcccgagcctcggcatcgttccagaaccatacaccttcgctgcgtcaaggacagcaaggtaatctgtcgacatccgactcgggatctttcgtcgatgagccccgtcaacaggaacctgtcgctgtggaaaagaagaagaaaaagggattcaaaggatttctgcaaaaactcggagggggcaataagaagcgaccctctagcggatctggtcgagacagcttggatcgtaacacgcgagctgaagacgactttaccaccccgctacctcctccgccctcgctttcgatcctcatggagcgatccgatcgaaggtcaaagcatacacgctcgccatccaacaacagcctttccgggtcagccgtgcagccgatggggaatcaaagcgcgaatagtcggccttcttattcgaacgaccaggcgcaacaaagatcggtatccgccccgattgtccaatcgccttccaaaagtagcctgccaagcactagtccgtccagctcgcggtatccatacggccgagacaactacggcaacggcaacgcgtcggcctaccaaagggatagctacgcctcgacgtctacaggtcggcgcaggagcagcatacctggcctattcaatggcggcacagaagggttcgaggatcgacgtatggatgcgaccgtcgaagttctggaaggggacgatggacgtgctaaccgctccaacggttggaacgaagacactaatcaattccagccggctcgattctctcaggatcgcggaggtcccggatcgatgacgaattcgagcggaactctgatggctccctcgatcgagacccctctgatgggctcgggtccggccatgcaagccggtagatcttcttacaataggtcggctagcgataaccagaaaaatcttccgcctctccccgctcagcaaggcgaccatggcgcgcaacaggattacccatctccccttcgctcgccagactctttcaatgcctttttcggtcaaggcaccaccatgtcccccaatatgaacacgcctccggcgccttacgatacgcacggacgcacaccctcgagtggtcaacgatcctttgcgtcaggtgtatccttcaaggaagactcgcatcgcgctcacaagaccaaaagtaaattcggacttaggggactcttctcgggcggtagcaagcagggcgtcctctcggatgctcaacagtatggccaacagcatggatccaatgttccagacactagcgactttgacgatctatcccgggcgaaatccgctggcccgcagtggaccggaccggcagctggctcggcaggatctcctttactgcaaaatggaggtcggcctatgcgacagccccatgatgagcgcgtgagacgcacgtattatcaatgatgaacgagcttctgcaatgaccgcaatgatacccctgttagagtaccgtagatgacctttcaagccgagagctgaatatctatgcttgtgcggtacaacctatgagacattgttattcttgccatgactagagctaggcgacgtctcaaatatactggaggtcatatgcgtatcatgaccagacaccgccagaaaacccagtcatttctgccaacgcctcttcgtaatggctcatatcgaaatctagatggccgagtgtctcgtgactttcctgagcctcgagcagggccccgttcgcatgacttccaggaggacctgctgtgaagcccatcgactgtatcccgttgtcgtacatcgctgtgatgtaatcggatggttgagctgcaggaagctgatactgtggcgcgccgtatagcgaatacgagggtgcttgttcgagatagtcaggtacggccggaatggagtactcgtaattttcttcccacgtcggctgcggttcttgaattgcctggtaagctattcctggttgataaaccggcatcacatcccctgccatcgcatattggaagacttctctggatggcgggcctagataagggtttcgatctatcctatccatctgagttgtgttggcccaggatagctcgtcagatacggtgggcgccgagagcatggggtgcctgactacgctgcgatcgctaggctgtccgatgctaatgtctggctcctcttgctggtcttcctcttcctcctcgaaagagagggaagtctgtgcgctttcgcttcgccgcttacgtgtttcggtcgatgccctacggttcctgcgaccgacggaggatcgcttggtctggcgcatctgcctcgcctccctgtagacgtcgatgaacaaaatgaagtaacaaaaggtatcggtcagtcgatcctgctgagtgcgcagacgaccggccactgactttgcagcgagcgctttttggattctgagacgcttccggttcgaggcttcgacagctttggctgcgccggcctcgagctcggcgccttcttttccctctagcagaagagacgcaactacagtgcatcttttttcctccacgggatctggcttcatcttgcgccggactacgttagtccgcctgtagactggttggtacttgtagtcagggtagctatgcgcaaagggtaccatttagcattgaagctcgactgccatcgtctctctggcagacgtcacttacttgcgcatatgtgcttctttttcaattcgagcctgctcttggaatttcgcttttgtttgcgggtcggcctaaacgacgggatctgtttagccatggcttgtcgtcatgtagacgattgaagagctcacctctgcccacatctttgacaccacgaccgaaatgttttgatggcggatttcgacttcgggagggatgagtttagcgtccacgacgtgcttgcgaaataggataaaggcgttccggggccgagggatgtgatcttcaggcctctgtacacaaccctgcataaacggaaaagatcgaacgaggaccagaggcacaggagctgaccttgcgagcatgcgacttcttcccactcgcagtgattgctgtcaccagcttgacttggggaggatcttcgataggtacggcagctttacgcctggatttcgtctttcttttggaggtctgttgccattctccatcgctatcatcactagccgtctcgctttgggcagggcttgctcgccgccaacgcgatgtccgggtcgttgcgggaccagaggtcctttgagggagtgttttgaagatgggaattgcttcctcttcatcagactccgattcgtcgctatcatcaagctggggaaggcctttgtagctgtagtcggttccctggtcgctgacgtccgaggcagacacgccttcgccgccgggcctaagaaaggccggattgatggaatccaactggaccggactggcattatcacctacgcttcctataggagtcatagtgtgttcgaggaggacagaggaagctgaagcaccggaagacttccgagaatggttataaggggaatgacggtgtgatccacgggactcgacgcttggagagcgcgacctgagttgcaagccaccatcttgctgattagttttgtctgctgatgccataattccggaggccaaaggagagggatacatgagagatccccatgctgaaggtgaattgaagtgcccgaaaaccggagagatcatgggccgggtaagtaccatatcctgaggtgttggtggaacgatgctaaaagtgtacgcggctacgtgtcgcaccgtgattgacatcagcggtgaagaccacgaatcgatctcagccgatatcagcacgtacattcgctgtccccggcagttctgggggttctcaggaaatcgtcgaaggaaagaggcgatagtgcgttcattgtgttgtttctctagtctcgtccaagcagttttgatgatgacgggcattcgctcacgacctatcatcagtcgggcctcagacatctgccaatgtcgagccacctgatcgctctcgttatataccgacctcaaccagtgcatcagtagagcagcatcttgtggagtcgaggagaagccaaccttcgaatcgagcgaaacgactcctttcaacggatgacgcgcgcgcgtttccagcgtgaaacgcgcttgcaaaaggacctttgactgaaaatcatagccctttcatggctgcaaggggctctgggggcaagtatagacatgtgatcccgtccttatgtgccatgagcccacgttcaaggagttctgacgatccttccggtagatcataccgagtgtgaaacttgccgagaaaccggaccggggacaagcgaaaggcggatgaacggtgacgatcctgcggtcatcaaacaggctctttatccccagacacagcacatgtgtccagatttttcatgctgctgagatattatgtgaaagatgatgtagaagtatttcaagagtctcattcacgtttcataacaaccgagcttccatgaaaggagaccctagaaaacaccatcgcggatcattcgccccgtaccacccccccctccacccagcctccgccttaaaaaaagagtgatactcgtcgtagatcgattcatgctgtcatttcgattcgttacgcgtcgccttggagcctctggtctgcgcgggcgagggcgtgggcgtgggcgtaggcttggccgccgggccgtttcacatcgagacatccatggaagcagctggagaagaggatgactgtttatgcatatgactgtggtgatttttgcttcagtcatcagcggaatgagttcgataatggtcggaactcgtactcttcgagttgaattgtagcatatagctcttggcactcaaagataccatctgtatggtatctaaagcacagtttagacagacgaaaaaagattgtttggttgacaacgcgttctgatgctgctaggccgctgtcagcgccttcagacatgatcagacacgtgacccctcaccagacacatatgcattgattgagaagagtacaattgggacagtcccaagacggatctatcgatgttttcaaacctgcttcggcgaatctcaacgggttgcgaaactgggccccgtccgttgcaattggttgaccaagatgtcattgcacatggcctagcgcggtcagacagcgaatgctttagcgagtgctttctcgataatcgtaccatcccgtcacttacctgggcgacatgagcagctggatgatcataatggtcaagaatattcgcgacagtgcgcacgacgttcgaataagtggcaatcgcttcttcctgcggcagtctcaagatgtccatatagatgaccgaaatggcgtagagaagaagaatcgccgagaggctcaactgtggaagcgaccgcgtcgtcagaagtctgcaggccgagcggatatcaccaatgtcagctagaactcacctcaggcaagtgagggacggcgatataataacgttcaaaaacatgaatctgcagcgatggaaatttatttgcatgagtcaatccgcgtcaatttattggcgtcgactttggcaacctaccatcgaaagggccgccgcgacgcattcattggcgagctcccgcaactcgtccgagtaagctaatgactgcctccttatagcagcccagacgctcgtttccaggatcggcaatagcaccagcattttgagttgaaggtagatcccgcacatcgtaaatctcacaaccgtgcgctcgccctctgttgtgtcgagatcgacacgacctcgatccgccaaattttcaaagtggtcgaaatcctcaggcattcgctctcgaaattggatcaggctctgatgcagctcgatcgctttaaagacacccgcttgtaccgaggtggaagcagtaaattcgtcgaacatcaattggacctggctcatcaaatcagccaatcccacgagagggatcaagtagtaccggttctattgaagaggaagagtgggattagtaaggctgctcgaacaacgcggatgcttcgcgagacccacgtcagcgagaccggatatgatggagttgaactcgggcgagcggatcatgttacttggaataccgtggcagagactggcccacttttccatgtgatagcacacgcagagcgtcaatcgaaatccgtgctcatccgccacaggtagcttgtagaccccttcacgcatcagtccgacgctcgtggcaaggcggctggcttgaccgatggaggcgagctcctctgtcaggcaaacgaatcgcgcggatcgtcagcgaaacatccattttcaccaatattgatggagaccgccgccactgaccgtcactattaccataactgcgactaaaagccgccattacgacccagaggtttacgaggtcaacgccgccttttccttgaccgtgttccaacatgatctcctttgctttctgcttgagcacttcactccatgcgcgagcgacgtccttgtggcattgtgcgtccccgtctcccccttcaatttgagcaccgaacgctagcactatcaggtcacgagcacgctccaaccggtcgctcttgtaggccagattatccagctgtcggggtttcggctctgctacaccgagcgtgtaagcgccatagatggattcgcgaactgaatcgatgcggagaacaggaaagagaggatgaatgaccgtcttgtaagcgttgaagaaccgataggctagctctgctggaaggaatattgggtccaattggtttcctggcagaaccgaatcgatgtggtcatgggttctgcacgttacgatccaagcgatcagcttcaatcgacggacgatcgatggggagagtcactcacatatagcgatcgacaccccatcgccaaacatctaacgatcgacgagcggcaggcccggaaggagtcttggaaaatggacgatcttcgtgaggagcaggggtatgtgacattctagtctccagcattcgagagacaaggtcttgaatcccgagatatgacgtcacgcctgtcattatggtggtggaggtagggaagattacgaaaacaatggctcatcgtctcgagcggcatgatgtaatcgaccgaccgtcattacccccgactcaccccagtattccatatatcttacatctaaccctgcacgaaaggtcgtcaagcccgcattgccaaaagaatccgtttcggttcggaaaacatctagatgtggttcgcctatgagcattgcgatggtgtagatacgtcagcacgatcacaaatctgggtgtccatattgaataggtgattgggactcgccagaagaccggacgagaatcgcgtgactatgcggccctgtatccgggaactgagacgaaagcgaggctataccaggtacccgagaactatccgataaaatcttgtagtctgacttcagttcgaccgcctcatgctcatcatcgaatcttatttgttggggaaataactccggcgcccggctcgaggatggcctggagctcgaagacgcgaccggccccggtatcggaaggaactgcgatggcgggtacggataatcgtccgtcccgtgatggggatgtgaagaggagaatcgtgtggccccaggcgctgcggcatcgaacagtattgatggatgagcagtgccatgttggtctgccggatctttcatctcgttaaagaatcgggagcccgatcttgactgatagccgctggtgtcggaaacgttggtcccgatgccaaccgggtcattcaggtaggatcgagccgagtctggtcgatttctcttgaattgcttggcgacgttctccgcatacacgtcgatgggctgatcccgagggggaggcggatagatctgaggtcttcacgagaccaaacatttcgtcacaacattgacaaacggtcgcatcagccatcaaacgctcgtttatatcacgcgccctgatcgaatgcttacgaatccgtggcaccctcccggaaggtggcaaagctcgaggaggcactggaacttccaggttcgttctggctactggtgatcgggtacggataaggaccttcgctaccttcagtcctgttgcctgcgagattcaaaagttgccttcgcgtcgtaccgctatagacgcagaccgacagatgcagacgacatgcagtacaaggatcgcctccatcacactatagcaagaaatggaggagatccgaaagatgcgggtcaatctccgagtcggatcgtgctttatgagttggccaaacctcgattcactttaactttgctaaacagtgcggtaagagtgactttgtcagggtgcctgcggtcttgcgagtcggcatacgacgtctaacataccgtagcttgcaaatctttgattgcaattgtcgtgaatataatatcagtgctgtttgcccctaagtgtgacgaaccgcatgactcacgtcgcatgctgtagatgttcgtagcggtacgaatgagcgaagaccttgctgtatgctcgcaatgtcgtcttcatcggccgctttgttctcctcgttggtcatcatgtcggtatcatccgcctttgtttgcatgttggcgtactgaccatcttccagatgattagaagccggcatcacaagccgcgcagaagccgccttgccgtcccgaacgtgcggagaagagccgtactgccctgacgtgtatgtaagtctagcaccttcagatggcaacgctgtgttggtccagttccctgtatctacaggtctggagggtccccctgtattgctttgaaaagctccagagtcggtccactcctctctcttctcctccgccaacgagccacgcgtgagagccaagaagtcaattttgagcgttcgagctcatccacaaacaaaatccgacgtcaagcgatgtgcggcttagatcaattgaagccgattttctcggatcctccgtacgatgttcctttgaagaatgtcagagaggtgtgcgagtgcaggtgttggtgtacttttgtcggtttggagggtttgaatctctcgatgagctccgactcgagctgatgatcgcgtctggttggtctttttcttgcatccgcggacagcggggcagtgaccacaaacgccgagcctcgccgagcgcgccgaaagtggcgtcgccgaacaggatgccggcacaaacaagtgaatcaccctcctccgctaaaaggggaaataatcaggcgaaaagccacgagacaagggtgtcgcgcccgtgatgatatgaaacagggagaagaaggagaaggagagagagagagagagagagagagagagagagagagagagagagaagaaaggagcatagccatcatcaagcgtaaagtgtaggtcgaagcggcctaccgcggacctcacgcagttgccatctggcaaccgcgagaacgaagcgttcggtccatgcgctccgacccgggacgtattgatcatgctttcgatgttgctcgccgcctcctacccggacctacactacaaaacctaggtgataagtcaccagcaaggctgatgtcaacctgtttggtatacctaaatcgccataccacccttctttctcggtgctttcgcaggggtattagaagctgcagccgctgcgctcctcgttactcttagcgatggggtcgaaggctcggctacattatcctgtgtcagtggacgtcggacggagggcggcggcggtagaaagtcttcagcagattcccagcctgcggcggaaggtggcggcaaagtgaaacgtgccggtgcaggcggaacgagctcctttcttgccgtcggcgccggcctctgcttggagatttcggtggaaggcgcctggtctctgatagctgccggttcggactcagccgggcgactatattgagccaacaggttgctagtaaccaatcgaatattcaccttaggctacatcggcaagtctgcgtgaccttcactcactccatcgtagacctcctggtgtagatccaattctgcacgctgtccttaaattgcgctagtcttgtggcgagcagggtgtgaaactgtcgagagtttcgagcagtggtaagcgaactacacgcagaccatcgatccggtatcgcagcttgccttgagaccctcctcgcaattggcaatgatctcgcgccatttccaatatgccagttccatctcttgtagcctcttttctcggtatctaacgcgagagtcgtcttgcctctggaccaagaattggttattgcgttcctataaatcacgaatccgttcaatcgcaaagcgcgtattgcaatgaaaccgcttctactgtttaggtagcctacctcgagcgtaaccagaattcgctcctgctgctcgcagtgagtccgcatctcgtcgaccaatctgtgatacttgcgcagttccttctcaaaaatatcctcgaacagctcgggtttcacctcgccggacgctccttgagacactttcgccgcctgctcgaggatctgcgaccggatgtcgtccttggaagcaacccgtttgccttcgttggccagccgagcacgatgagttcgcgcgtcatcgagatcttccaaaatcgtctgaagagctcgtgctgccgctggtaattctgcatctgcttccgtagcccttccggacgtagggatttgcttcattagagcttcctggagaagcaaccaggaccacatcaatatagtagatccaactgagaagcgcagagcgcctgcttacctcgccactagccagtacgttgatcaagggcgcccattggtcccacttcgtccgaacatcttcgtcgctctttcgggcctgtttcagtgtcgcccgatatcgctccgattgatctacataatggcgattggctgtagctgatggctcagtcatgcccagcatctcgggatgttgctgcaacatgtgttcctcctcgcttgcttcctgatccagcaggtccatggcctatcgatgctgaaagatgagctatctgcaatgtatcctcgacattaaagatcgcctcacttgattcagtattgtcaagctggtagaagaagcttgcttaatctcctgtatcaagtgctggggcttctgcaatcccccttcgacaaagacttcttctgcctttttcagtaacgaaggcggaagtccggcaggtcgttccaacgccgtgatagacccaggcaagcccagggattgaagacgtctgcgagaaagtgaagcgccatcaggaaaattccttttgctttccaaaacgcggcaagccgtcgacttgcgtggctatcagggcatccatgcgatcctgctgttgctccaattcatctctgacaagcgtgtccttacgatcgtcatagatacctaaacgagaccgggagtgatcggtatgtcgactgtaacaacggagctgcaaagtcatctccactcactcagagccagatgaacgccatatggcacgagtccggcgaacagaggtccttctttgtgtttgcttatccacgcgaggctgtcctcaatcgcaggtggaacgatcgtcttgaccatccccgcgggtgcaatcgccgcgagctgtcccggaggcggaatgggactgacgtagatgatgtcgttgtctcggatcgcccgtttgagattggaggctagagcgtcttgcagaccctaccgagagagtgctcagcatgggtcagcgcctgcccgtgtcactcgtcctacattgccgccaggcggtgactcactttgatatcctgcaagacggcatctcccgcagctcgcttaacctcgttcacagcctgcttcaaagagacttcggcctgcttcatcctggcgatctcctctccatacctgagaccgtatctttagggcaagactcgccgactcgagcgacgagaagcggagcttacctctgtttggccaaatcttcctgactcattcggtactgggacacggcctcgaaatagagcttcttggcggtcatgtgcgaaatccagctctgtgccgaggtccatgtgaactcgtgaacggccacgcaacggactggatgttcagaacgtacctgaggaagatgattgatcgctgcatctggggtctcccgcgcggcttccaaagtcaatcgataatactctgagacctacacgaatcgtccggatcacatcagtcgtagacccttgcatagaggcttgacgaccatcttcgactcgccttggcagccaactttgcaatcaccccgttggtgtatttttcccccatagcccgctgccagaaacattcctgcgcttgggcgagacagaacgtctccatggtgtggataaaggatggggtcatgtcgtaccctgcggtctgatccccggcttgaggctcatatgaggacgacgcaatatccgacgatagcctcggaagtagatgcacacggagataactcaatgttcccgctgcgtactggtcgtcaagaaggtcaattcgaaattgagagtgaaacgacgacggctaggctgagggcccacctggaggtatgtcaacgcgcgcttgattccctcggtttcgtccctgttctccatggccgctagacctgaatagactgctgcgatattgtagaccacgccagcgcgctcatacgagagtgaaggtagagagatggtagggtccacttgaaacgaaaaagaaggaggaaagggaaggtggtaggtaaagcttgcgccgacctagtcagacgaaattgaaggtcagatatcgagggaaagctcagtctcagcgaggcgatactcacgttggacggaaacttggtcgagaggaaagccacctgagcgtggtatctgtaatggccgcgcggtcagccaactcactcgctgaccgagtatgaaacatgaccgttgacgacctacagtgtcaatccgtcaatagtagtcggatgaacgtccggtccatcaccttgacctccttgaacccattccctacgtaaactcgacaagcgcgagatgtcgccatcgaacacgtctgggtgagtatcgtgaaagtggtccgcgatgtactccttgagcttgggtgccaggtcaaggcaaggttctatccgcttcaaaggtagaggaagaaagtgtttctagatatgcaagtacaagtggaggatgggtgggcggtcaattcgagcccggaagagacagtacttaccatgatgacgcagtttgcgtagcgtatgcccagcccgccgtgggggtacagcttgatgggttatataggatttgccgctttgacctctacgtggctctttgaggcagaagcagagattgccgttgaggagcttctcctgctgctatgaatatgaccgggaccgtgtgccgctcggggtaacgtcgacagaatgggtcgggagtgaccggaggtgactctctgtaacgggtgcgatccgatggtgacttaccccgccgagatgggtgggtctattctgtggattgcaggactgcgcagctatagcaggagagcaaggtaggccccagggcgagaggagagagagagagagagagaggtagagagtgacggtggtgacgcttattgaggcccgggaaaagggggttgtacttttgctttgttgtaaatgtcacggggagcgaggttggtgacgacctttcggatattcggcgccgagcgagctacgaggcaagcgggtcttccctccttcattcacaagcactactctactactttacatcgacttcacccgtcttcgatcaggaaaagaggcacaaaagacagcgtagcgcgtttgcaaacgtatctcacggttgactaaaccctgcctgcaaaactctcgccgagcttccggcagaacgaaacgatcgtcaccagtaccagttcctcgtcatgcctcccatcggtccaagagatttcacgatgccgctcggtcagtggttccccgccgctcatccttgtcctctgtttaaaggtcaaccagctcatatgtgcatatatctcacgttcaccaacatagccgcctttgggatgatctttgtcctcggatcgttcatctactcgtccatcggcgaagcaaagagcatcgccgcctcccgcagggtacagactcatgcagacatcctcgagtcgaggaaacgattaggcatggacgcttgggatcagagaaaggagagggagaggctgcgctccgagtcgaaaccggaagagtagccgagccaggattggcaaagcgggagatcgaagggagacacacaggactcggcggaacggacccgcaggacgacgactgacaggttcgcaagatactcgaccacggaatcgaaggggcttcttggcgactagtttgaacgaggtcaatgcgagtcagtcgctctggacggagacacgtcctcaaatcgaatatggacaccagaaagtagttgctccgatccgcccgcagcggacggatcccccacttcgactcggaacaacgagcttagcaaggcatcttgacgacgatgacccggaacctcaccggttaagatgagatggaacgaggtcgcatcgtttttttctcacctcgtacgggcggaccccagcacggcgagcagggttagaggctaggcacgtcacgtggtcattgtagttgtatacagagaaccagaaatatttaataaggctctttccatacaaaccataccagcaacagaccccacagagcgtcacgaattctagggccaggaacagcaagaaagcggcgttcccaagccgtcccatcgttcactcttgacctcgattttgatattccttacgacccgctctatgtgcatagcaaagcagcggggacctattcgggatgtgcgatcttggaagcctgatcgcacggccttatactttgaaatgctctcctcgccggacgctcaggcagacagaccaggaaaatcaagtctagtgatgatctataacttgcattcgcggcatgctcgataaatatctctgataatcaaatctgccacgtctgctactgttccttgttgaacagtaggaacaccccgagcgtccctaagagagcatatttcaactgaggatagtcattctgtcgaataacggcaaagaagacgaccgaggtcggtgttagaggaccacctcgggccgaatgagcaagatcaggagcaattcgagctcaccatgacgatcgtcacgtatccaacatgcggcaagaacctgatcaatccgcacgtgttcaatggacactccatcggcctgctttctgacaactctcggaggggctggactcaccctcgaacttttccgacgaccatgtccctcttcaaccatttcatacccctcatatagctgtgatacaggcccagatcgtccgtcgggttgttgtccccctttgtcagcatgagctgggtcgacgtcgtcgtcccgttcgtatgcgcgatcgtcgaagtatgggattggatgattcgatggacgatgggaatgccagcgccgggactattgcaggaaaagccagtgcgttacagtgttcagtacggacgatcagcgactatcgtatagaaaggactgacattttgtaaacgggaatgtcaccgatatcgtacgagtcgctggcaaagttggtcaagaacaggatatctcctcgtgcgaatgccggttccatcgattcgctatggagagcgtggtcgatttgcagtcgcagttggacccaactgatgagccatgcatcaaagccacaaggtctttcccaggacttacgaaaggaccacgacgataggtgattcggaattcgtagcaagacatagcgctttccatcccatcagcccacccgcgatgatggtggccagattgagggcttgaagcaggatctgaagcacgaaccgaggacaaaagtgggcaagtgaatgagctgcgagaacatccaggccaggttcgcggtggtggtaccgatgctcacggccctgaagcccatccggcgaagctgattgatctcgtccatgaacatggtgagacttgatctttgattgcactggattgagcaggtacgatatgagttgcgagacggcgaatgacggcgaatgaattcatgataaacaggttgcgaggttcaggttgctcttgggggtcgattccttctccacgtgatggcgacgatgagggggcaggagaggggggggaggggggttcacgtgacaaactccggggacttgtccttggagacatccttgtgccaggcacatagaacaccagagaggcatacccaaaggatagaccgttatagtggaactgacacagcatccgttgtacaatcctaggtaggagacctaaggggtgagtcctgcgtggaataacaaggaattagccgaggcctaaccctaacaccaggagtcagccaaggtctaaacctaacatcaacacacatctttagatatgacaacactgtccatcatgtgttgttgtcgtccaatgggtatcatgactgtccaataggcattggagtattggtttgtaacaacagtatcttcagtgagattcacactagccgctaggctgtaagtaccggagtgttttacaccatattactaagtaggacctcctgctaccattctcttttgggctcctttatcatgacggggcattctaaataagcaggatagcagcacaagtagggatctttgggtatggataatgtaagacatttgcatattgcagtactattgagggtcaaatatacggacttctgcctggactattcctcttgagaatccgcttccatgtttcgtgtgacacgcttcaaggtgatatctacagctcacagtctgctcgagaataccacagcttcaggctgagtaaatgactagtccaattgcgacccgttaccctattcagcatgcccccaatcagtgttgttgcttatgcacaactcgtgaaacaggtacaagtcacttgtgcacacagcctttgaacacactgaatcttgattttgcatgcacagccagagaaattgtgcgcttgcccctgtatacaagactagctgcagaggtctcttggcacaggaggattgattgagcaggggatacactgcagatgtatgacatgggttgatgtaaagtgcctataagcagatgctcatctctgagacccattaaacaattattgagtgacatcaagtccgtcgcaataattgttgcactgagatgacattgacaattgagtctttcatgtcgtcagggttcactatgggttacatgggttcatgtccagctgtaaattaagtacggaaaggtgctgcattaagctagattcccaagctcttcttgccgctcatcacactcccctaactatgctgggtacctgcttctgtgtcaatctgtacctttgggtagtaatgcaggtaggtctgggcagcatggagaggaagagtccggtgaaggttgttactagtgtatgttaggcgttgttacggtggagcttcgctaagtcgcgtctaatgaatgtctaagtgtcaatgtcggtacggattgtaggtagtcacaacaggagtgaagccgagttcagttaatggaagcgaattcggttgggatgatacgaatccgggttgatgtatggataaggaagtgctgtcgctataggtaactaggatcaagtgcttgttcagtacgaacaatgagacgtctactacttagcgagtgtcctggattgtaacctcttcacaatacgtcttgaagatgcagtgctgttgcaactcagtaggcgtaaatagaatgcgatattggaacttgaccttcctagtacaagaaacgtcgtctgccggattcggtcaagttctactaagtatacatacaaaaccgagagtagtcgcagcgggttgagaacaataggcggtccaagaatggtgaagcgaatttggaacaaagagaaccaaattgagggtcgagaatcgaacatctaataaagaggaattgttgtttgctgagtcgagatgtctttgttcgatgtagtcggttgtcaagatatagggtctttgttgaatatccgtcgatatcgctattgttctccgaaggtggtgatattgaatatgcgttgtgttgatggtagtggtaacgatagcagagaaggtgacgagataggtgacgagaacgcgcgagccgaagccataagtgcgccagccagatgcgcgtcgcttcccgtaacaggcgtcaaggaggtccaaatcggactcatcttggaggtagcctttggagacgtttttcggaggtgaggtatgaacgtaaggtatagctagatagattgatgacagatgcagaactactataatacaacatagagacctattccccaaacatgtcttcttgatacctctccggtaggtcgctccaaggaggtgctccaagagctgcctcaaatacacagtctattgtactgaacgcttgagtcgctataacagtgtatagccccattgacatctgttataatgaacaactaagtaggatcctattgcaatgtagtgtctaggtttctcttctgtcactacgccctgtgtccatcttatggccttgttctaatcccccagacatgtcccttttggctatctccatgctggcttctactcgaactagtctacgcttcatctacagcttactcatctatgcactgccacccttacaagttccacgtaggactgccctgctggctgcctaacagtcatgcggtatgatcccttctgtaaggtcgagagactgccaacccatcgcgttcgtcagccactaagagcttctatgtaccgtatcccgaacgagaaaacaaatgcaccaggctaagtgcgtctctagatctctatcacctttgacctacgtgcatcattcacatgctgccagcccgaatgcattgttgacagagaggggcgagtccgatgcgggtcgaaacgagctcgctagtcgcgaaggtgaccgaagtgaacagtcgccgatatgtctcgggctgacagtcgcgtgcttaattgtgcctgatgatcgctgatccccgcgcggcgaaccgctctctagatcgcagcactcgccatctattgcctccgcagagatcccgggctctcgcaataagaccgtattcgagcgttctaggagaagccggagaagcgaaaagcaacagggcaacaggcaaaagatgcagatgaaaggacgtccgaccctctatagatctgccctcttctatagagatccggagcatcgatattcgcgaaaccacatatcgaacatcaagaatacctcccaccgccaggttgaagctggactgtggatctcgccagcccgaaaggcatcgaatcaacgtgcagtaatcttactatgtattcaatcaacaccagctccacccggcagttacctatctccgcgacggatgtacccagctctgccaatccggatggtgatttagcaagtctggctttgctagagcggcatccggttcgaccgcgagaagacaagcaagtggtcaactccgtgcgacgaaaaccaagtccgttatggcctcaacacgaatgggcatctgaaggttccgccaccgttgtcttgggagcacctatccacagcgcgggcctgtcatccggctcgactaccgatagcgaagcgagcatgttcatcgctacgccaaaaacaccagtggattcctcacatttctcggcggacccttcgccgaaaccagctcagaaccaacaatattttctgcccgtcgatttacctcctcagtctcacgagaaagagggacctgtcaatccaactggcaacgttattagaatccgtccagcgatcagcacgagaacttcatccgtgcagacggaagtcttccgcactgtgtcgaatgaccagtctctcaaggagagcaaggatttacagaagagccactacgtccgcgccgctcgacctagcccaacgattctcacacccgatgcgccgaattcgcctggagaagcaacatccctcgcccgaccttcaggttccagccgtaccggcgaaagctttactgatggcctgagaattcaaggcattttcgagccggacggaaaagatggcggcctgcgacgcatggaatccaaagcactacctccgattcccttgtcgcgttccacgaccggtgtggctgggggtcctgctccgctgccaacatcgacgagtacagacacagcctggaagacgtaccagcccaagaaagtcaagcaagagttttccgtagacaagctagtcgacccgataaagctctgggaggcgagccattgttacgtgaccgacgagcttggccgcaagaggcgctttggtgaattctttgacgtttcgccagaatcgcaggcgcctgctggcaggcaccccccaagccgatcttcatcccgcagtggcctgtctcgttacagttcaatcgccgattcgatcggatcgcgatctcgtaaatcatgcggaggagagaactggaatgtgccgggcaggaagaccgtggttttctatatcaggcacttctggtgtggccaatgtgagcatgagcccgacgacccgcttatttcagtgggcttactgcgcaagtacccggtcaggccaagacttcactttcgcttccttgtccctgcttgatcctgaggcgatcaacgccgctggtattaacgtgatagtgtaaggttccaagcacaacaagcaatgttgcaaaagctcactactttatcgtacaggatctcgaatgggtcctggcgcatcatcaagcgctacagagaactgttcaaatgtccctatccaatctacgtggacgagcagcgacatctgtacgaaaagatgggaatggtaagagatggcctgtatgtacaccggaccgctgattcttatcttgagtgcaaattaggtgctgttgaacaacgactttgggcctatgttcaaaggtcgtgccgcatacaaccaaaggagcgccccgtcccagctggtgcacggcttaaaggtcagcctacagtcgtattcgctcgacctagtcaagcttgttgaaacgcctctatgtcgacagagggcatttgtagatatgccaattgccaatccgggtaaattgacacaactgggaggggaatttatcgtcggccccggtctgcagtgtcacttcgcgcatcgaatgacaaatacaagcagtcagtgtctcctccgactccgaacagctgaccaagttattgagctcacccgcttcttcgccgtggtacacatctagatcatatggaagcctttgacgtgctgcaactcgcgggatgcgagaaaccgacgactgacgagcaacgcatacaaagattcgccgcggaagaactcgcagagatcgagcagttgcagcgagaagaacaagagtggagagaaaatcgagttgaggagattgatcgcatacagcgcagcagggctgcccgccgtcaacatctctccgccactgagcagcagcaattggagacttccatcagaaggctcagtatccccatggaaactcaagaggatcagccagtgaacggcgaagaactatctgcatcgcatcaactggccgaggtcactcttcaacccatatcagaggttgaacggcccgttctcgatgtagatcatgtgggcaattagccccaaatacgaaggacgttcgtgtcatcggtctatacaattataatacgtcacactacgattgagtgaatagcgcatgtcggcaattcatcagatattccatttcacctcgtttctagcgtgcttgatgggaatccgtatgactgacgggtctcccatggcggtctcctcgagactcctcgttgcggtggctcaaattcctcagggctgacctccgattcagccggattgttctcgcccgcgtgatttgcatctgtgtcgctaggagcggatctgccacctatacggaataacctcttgcgctttgccttgactttactgttgtcgagggtctgcacgtacatgccattctgcccgagagcggcttgcgtcatgctcagacccgaagaagaggagggatgcgtccctacgagcgaattcgcccttgagaggtatggaaaactccgaacagcaatatgctcatggctcctagcgtatgggctgagagtatggtttgaatgagaaagcgaagccagttgcgagaccgagtcattgagaggcaagatgatattgttgtagcgcgctccattcatcgagcctaattgagctggtcctggcggcgaccctgatagcgatgcttgttgtgggcctgaaggccgtctgtttcgtggcggtgtgatgattctgttgacgggatacgcttgcatggacataggccgctgtcgcggtatgtgagtggagcggtcaccaaactgattgccatgggcagaggccgcgctcgatcgagtgacgacgctctgcatggccgagggaccacgcggcgttcttgccaaggccatcggtggtggtacgctctcagaccgactgtgcgacctggatagatcaggtctcgacgtcgtgacccagtcagactgtgggcttatcatgtttcgaaattgaggggggatcatacggtctggccagattcgcttgaacgagtccccgctttgctcattccagattgatcttgccatacccaaacctaccgatgacccccctgcggaggatctgacactggaggcgcggcctgttttgccgctggcgatcgctctcgtagttcccgatggactgctcgaagatggaatgtgttgtccatgaatacctgcctcggagggagctctgatctggctttgcacgtggaatatacgtgggcgagtaatcgggaaatctgacataggcgaccgaggccgatcaccgctgtgactgtctcgagatccctttccgcccgttggcacttcgatggtcgatccaaatcgtttcgaaatctgagaacctccgtatgatgggcctctaggctgcaatgccgcacggagagatgggctggcgtctacggcgttcacgctctgcgccccgtcatcactatcgaccatggcagattcgccatcttcaaggtcgatctcaagatcttctcggtcggcttcgtcggcttccatgaacgtgatctcttccgctaggctcatgagactgccgagacccttattcttgcggttggtaggggtatcccataggcgaccgaacgctccataacctgaatgtgatggaacaccttcaggccgcagaccgtatgtaggatcgtagttttcgatttccgggaacgtcgtgtacgatgtcggcgattcatgtgtaggagcgggggttatgcgtcgccttgtctgtgacagtctcaactttcgagaaggagacaccgatatcgaatcgtccggaaccaacgagtccgctccttcgccattatcgaagtagtccgctttcgttgcattctcgccgaagcgatccgcgcctcgaggaagaggggtatgaggatcgttcgggtcgatcttgacggtctcgtgcctgtacggcatctccaccttgccagacatacctgctcccccgaaccatttctggctgagacgatgaatgatgcccggcagatcttctctgaacagttccttcaattgtccttcgatctcctgctgcaggtatcctcgtattacctcgatggaatcgaatgtcgatgaaacgtcaacgttttgcagcgggtcgttcttgaaaacgagggtgattcctttggatttagacacaaccaggatcagaatggcgcggaggtttagagaggacaaccgcagcgtcatcggcactagcaggggttgagatgccaacaaaggcgtggacattggtagtgtcgagctcgaatcgaggtgagggttgtgggaaagcggattggcctgaactctacatcggacttcgatccaggcatccccctgatatcccaatcggaaaatgccacgaaaccgatcggtggagaggtccccaatttccagaagcgtcagagtcggcggctgagcatgaaatgatgcattaaacgccagaatccgcttgagtcgtggagcatttgcttacaatcttccccatactcagctcgaccacttctatccgcccctgtatgacggggggtttgctgccctaccgatacaagagcgacattggttcagcctgaatacatcgatgcctctaagatcccatgctattcaccttgttcaacgctccttctagcatcgccttggcatcctcatgaaagccgggggaaaatgcggttgaccatgacggaaaacagaacgacattatgtactggcgatccgaacgtctttacttgttgcgcagctttaggctggctcgccgattcgtaaggtcgtcctacctgagcacgttcaaaatctgacgctctgaccctcttagctcgacactatatagaggcataaaaggctgacttgtccgggaagactttgagcgtgagcctgccgctgggctagtttggggcgattcccttcctgccgatcggtcgctatataccggtttcgaacatatagccttctcagaagggtgtgacaggctttcctagagctgaagacagtgggaactaggtcgcatagaatgaaggcggagttgaaccatcgaactctgagagtctggtagttgcaattggtcgttgagaccttgcttcaatggtgcgttccggaggatcatcactcacggccttgcgcgactagcttccggtggttcgatacgacgttaaccgagtcgcagttcacatggttgacaagcatcgatatcataccgggagcatcaacactcaacaagacgtatggaagttcagagttgttacattatgactcggtcactgaatagagaaaagcagatcgcaacatcgagaagcgcttagggaggcactagaaataaacatctaacaacataatgggcacggaaagcagaagggcatcgaaaactttaccttctcgcagggtccgcggctccagtattcgagtagactgaagcatcgctgacgacgctctgccgagccgcgctgtcgtcggaaacctggagatgataagctgatgattggattgtgggagtactcggctcggttgcctcggccgaggatttggcacgagcggcagcgtaagccgcgagtaattgatcagggttcactgaaagcacggcgagacaataccatcagttcccttgttatggttcggaccgcaggacatgagtgagcgcaactcacttcctccaggtgccatcgccatgcccatcggactcgtggcgcgggccaccggctgttgtgcgctgagcgaagcgttaggcgcagcgtgatcggcctctacggcgaggttttcaactgcattgtcatcgccctcgtgaccatgatcgtagtttcgaccagaaagatcctgacttcgatcgtaatattgcgagtcgatctgcgaacgacggactatcaacagaaatggttttccagttagaacgatggctccgcaaaagcgatgcgtgtacttactcatgctttcctccgtatttctaatcgcctcttcacttcgacgagtggcatcgtattgttccatatccctctgtacatcgttccccgaggcagatacgactttcttgtccttcaagccgactgcgctaccgagggcgctgaagattcctgccttcttctcagggagggcaggcactgcgggtatgtgcgaggaagttacagagaagggaccggccgcctggctgggtgaaacgacgaactctacgtcatcctccagcttgcgtgagaagcgagccgaggccagacgcgaattgtcaatcgagtggcgctcgccgtcgacttgcgaaacggctcgccgggatcctgcgccgttgttggtgagcccagagaggttcgacttggtgggtctaagcgcaccagcatcgctgaacgaaactcgagacttgcggacgtcatcggcaaacgagattcgggactggcgaacgtcggtctgggaagcgttgaagaccgattggcgcaattggctctgacgcatttcggcagggatgccattgacgccgaccctgggaatccgcttggcaccgccggcgccggctccagccatattgttctcattggcgaccgagtagatggatcctcgagcgtccccgttgctaaggaagaccgatgtcgcgcgcgtaccattgctgatcatgcttgaacggacgccaccgggtccaccagcagcgctgcccccaccgcttctccaatcacccgagatcgtcgacatccgtcgatcgacatgttcggaccacctcttacgcttctccctctccttcatcctcgcgaatttgatgtacagcccgacaaagaagccgaccacaatgatgggaacaacaatggcggcggcaatggcacccttggacaaaccgggaggcttctcgagtttcgccgtttggtaaagtccgtctgaatcagtcgtcgtggtgaccgacccgtcggcggcggtcttggtctgggtcaccgcagccggttgcgagctagcagtggctagctgttcaggcgaagcgtgcacggagaaaatggggcccggcgtgaggaagaaagcgctcgtgtcagcctcaatgataccgaggttgaggttggcatccgcggtattgttccaccacgccggctggagtttgcccaagttgtagctgcctccgctgttggcagcaccatagaatacctgggcgattccactcttggtattggtgctgtccgaagaggcataactgtataggtagatgtcgacaaactcggtggtaaagcaagagctgtcccaccgagccgtcaactcgtcgctggcttgtacgacttgagaggcagtcggggactggtagagttgtgcggcggtgcaagctacgcacaaggcgagaggcgacgagaagcagagccggatcagtgttgatcggagaactaacgaagacttctgatctttgcaacaagactcacttcctcgcttggtattctctcgtcgaggagtatttctcttgaccgagtgatcgccagcggcgtaacccagcctgaatcgattgagaccttcgagagtcatgtcgtgacgatagacacaatacgacgagggaaggagagggtatccggagacgagtagcagaagctcgatacaagttgatgtattacaggtcgaaacgtcgtgtccgaaagaggtatcgccgtttataaaggggatgtggttggcggtgtcgagagctagatcaacgttggcgagctttgagttgttggccttgggatactgattcggatcttgttacttggttgcttgtctaagatctatgatctgtggccacttgcttggaaggactagtggaatgatcgaatggaggtgaaaagagcgtgatgtaggtcggtgtttcgtgaagacgtagaggaattaaaggaaagaagacgagtcgaaggagagtcggtaggtgaagtgaaagagtacctcgtgatcagaaaggcagagatagctgtggtgggcgttcaatcaagagcaagaggaggggtgatctcgagagcaagaggaggtcagcgaaatgtcaaagggatgtgatccgagtttgccgtcccgttccaggagagactcgaatcgctaacaaaggggcacaggcaggggggagggggggggggggcaccgaccttgcaacccgtagagcaacgtcttactcagcatcatcaccgctgcagcgaacccgatcaatggcgccttggggtccgacctcttttcaccccttcgccaacgcttgttctggctgaagtgggtgaggtagatgtattccaacccgagggtggcctcgatcacgttgagcgtggcttgagccgaggtgaagcccgagttcgaggtgaggccgggaagaccgtacaggtggtcgatctcgccatacaacctaggaatgaaagaggttggaactaggtgagtcttactgtgcgagctcaggggcatcgggactcgctcgtatggtttccacagccaatgcaggtcaccccttggcatggacctcggtcgcaacaaacagtaaccagcgtctgcgataggagggagtgacgcatgagtaagaatgacccatttgcttgcattagaataacgactgaccccagaggacgacgatgctgctcagcccgaaccagaggctgatccagagcgggggttgcgtccatggtgaacggaccaggtcgacacgcgccgcgattttcgagatcgagggtggcatcgcagcgaaatcgactagattgattgtctgatgaatgaaggatggattgcgacgatgaccagagccgaggttcctgacggccatgagagtgattatgagagtagattccacttcaaccacttctcgtttaggcaagagaggaacgatttgttgacatttgggaagattccagagagcagggactcgtaggagaccataagggaaggtggtcggggtgtaccatccttcagggtcggtacagcaggtttcaattcgacaggtcgagcagttaccaccttcgaggcgtagtgcaaagtaaagccatacttgatcttcggctcgggactgctggcgctgtcattattatcgttggcgcaagaagctttcaagaggacttgactagaagaggcagatttgcggtcggttctggatgacagccttggcaagccgggttacgatcaaaggcaaattccagatgctgctctgcatataaactacgtccaagcttttaccatttgaacgtccttgtcatatgctagagaaacatttgtagcggttcaatccaagtgcgatttaaaacctgtttccgtggtttcgcttccgtgaataagcttccggtacatcatccgagatccatgatcatgtcgaaagaccaagtagcaaagggatcgttgattcacttgcggcctcaaccatctccatactggagactccgaacaagccgcctgcatcatgatcggaatgcggaatcttctctggtcgcttttcgccccggctgtacttgccctttcaaacgaggctcaggtaccagccgatagttcaatctcgacaacggcgacgacggcatcgacgtataccctccaccaccgaatctttgacccgagtacgggatccaccccttggtccgtacgggggagtgtctcggtcatatctgatggagcatccgaatgggaatcgagccatggagaggtgttgagtgtgaaggatgtggggatggatgcttggtatcaggtcgctctcggcatcaatggggatgtgggagatgccgacgaggctcgttatgggatgagcagtgtcaggctagtaagtctatcactggtaccgcatagtaattcccgtcttgtcgctaatacgtaagccatccgatgaatctctagtgtcatctgcaaactagccccaacctgaccctgtccgtcaggttggacgagactccagccgaggtccccaaatcgattcatctctcgctctccagctcgaggggcgtgcctaaagacggaagatgctcaggaccgctcgcgtctgacgagctaccaaagatggcgttccacgtccagctcgttcgccccgaagtcctcatcccgtgagccagacttcccagaagtcttggtgttcccggatttgttccaccgtgcttaacatgtgctcccatctcgttcttagcatttcccctcaactctacgcctcgacctcgtcccccgatactcctgcccttgatccgcagacgggtaaacctcaggcgcccgccactaaggaaaagaccttctttcaaaagtactggatctacgctttcgctggtatgatgatctttgccatgatgagcggggaggaaccgcagaagaagggtccggcaaagtgatgagagggttgtcgaagcagagcagatgtagcatgagggtgtttcgggatgagatgtgataccgataaaggcgtgaaatatcaggctgggcggaccggtcaatcaggaacagtcggacagggtcgtcaggggtcgcgggacacacagtcttgtcgcttagaggtctggcccgcgagccgggtagatgccaacagtcgtactaggacatcaaaagacgttgcgactggtgttcagtattgaaagagcctgcgaggatggcggtatgaatcgggaaaatgatttagtcgaattgcaagaggagcccattgcgtaggtgaaaccgacgggccatccagaagataaattcgcgttgaagattagagacatgggcagcggggatcagaagcttgcagtgcaaggtaaaaaaggtgaaggattgagggaagaggctcaaggtccagatcaaggacaagtctgaaacgtcgttaacgagcttgacggcctaggaacggaacaagaccttgatcatacgcgaggtctagagcagagcttccaaatagagtagagctagggcgcagctccagtgagcgctgctcgagtcgggtgcacatgcttgcgtgagtgatcaagctgcacggccgctccgctaacaaccatccgagatccactttgcccgataaaaagatatgccatattaaccgaatccatatagacagcgacccacgacacgctgatgatgacgctcacacggtgtcgccgaaacccaatacccttctatttgcgcttgccatcttcctcctcgaccccagatgcgcccacggctttgctcatgaccacaccgacccagtccttgaccctctcttcctcgatcccaccggcttcgtctaccagcttgccaatgtcgacagaagacgactcggtggtcagtctcaacagggacttgttggcgtttgtcgatcgacggtagagcaaggtcagggaatatcggggtggggtgtagggctggctggaggagtgcgaggcgaggttcgtggatgtgacctggatggtctctgtctcgatctttgatgtggggagggcgtccatcagctacgacgaggcgtaggcgggcgaaaaggcgggagatgggactcactcgcttggacaagcttttacgcttgccgacatagatcttttgaccctcgacatagtacccgtatgcgacttgcatcatggccaataccgtataactgtcacgtccggcgccgtcgataaatatcgtcatttccatcagggtctccagctcgtgatactttcaaagtctatcgggctcggtatacactcaccagaacactcccaacatggtcatccctttcgtctgctcgaacccaaacttgtaaccgtagcccatcgttcccgctgcgatcaggacggacgtccaaccgagtgcgagccgaacatcggtatgcgtgtgagattgcgtgaactggtgttcagtcgagatgatctatgagaggagatgacagtgagttttcacgaggagctaccaggtcagccacgtctatatgcgagggacaaagggtgatgatctgatgaggtcgaccgacgaacctttttcacagcctcgtccaacgccagcttgatctctccaaggctcgcattgttgacgtgcaccgtgggcaagggccggccttcgagggtgggaaactctttcatctctttgacgtccgagacggtccgggatgataggctgttgccactgctgaaaggtcttgcttgcaggaccgctgatgatgactgttgtttcttggccatcctcagaggttattgcgtggggtgcgagaaaagtgtcgattgaagatgtgttttcaccgtgcgaggaactccacgacgtctgatttctcgataagggtgctgtcttgggattcgatacgatggtacaaaggcacaaccaactgaacgaccgagttgatgatatggtcatgatcgtcgaccaccctctcgcgctagcaacttggcacgatgagtcaaaagtcgagcagaagcgagtcgagacccgagcaacaccactgcaactgcaactgtgcaactgatcaagtagtaagtactcagtgcaactgaattactacttcccaacactacactatcgactgccgtagaaaaccaccacacctctctccacgctagtcgaaactcggaccatgtctacatcttcatcggccgagaccatcgccaaggcggcccgggaagcgttcgaagcgtcccaactcgtcgacgctgacaaacgcaacgatgcgctgcgggccatgcgggaagtcttgcaggagaacaaggatgagattttggcagccaacgaaaaggacatggaggtaggtgcgcggcgtatccacgtctgatcaaggaccacgatgcctacacctgcgtttcgcacaggccgcacgacctctggtggaatccggtcaactatctgcctcgctcgtctctcgactctccctctcccgtgcgggcaagtttgaatccatgctctctgggatcgacgaggtcatcgcgttacctctccctacgggccagacgacctattcgaaagagctctctcccggtctagaactctaccgcgtgacctgccctatcggcgtcctcttggtgattttcgaagcccgacccgaggtcgtcgtgaatatcgccgctttggccatcaaatctggcaacgctgcgatcctcaagggaggtaaagagtctgtacatacggccaccctgctgaacgagctcatccaacgagctctgggccggacggatttcccatcgacgtcgatccagtcggtagcgacgaggagcgagatctcggccttgttggcacaggagaggtatatcgatctggtcatgccacgcgggggtaaagcgttggtccagagcgtcaaggatcagaccaagatcccggtcatgggtcatgcggatgggatctgttcgatctatatcgatgacgaggtggagacgggtatggtcgagagggtcgtactcgatagcaaggtgggtccgaatctcgggagtggtggtcagcgtagacgggcatttcgatgatctgacgacgacgacgacgacgtgtgtgtgcttgtggtttttctcccgatcagctcgactaccccgccgcttgtaacgccttggaaaccttgttgatccacgaatcccacctgacgaccctctggccacaactggccgactcgctattgcgttccaacatcacgctacacctggacccgacgacgtacacgtccctctcctccacgacgctctcgaacccgctcgtccgacgagccggacccgaagcgttcgatacggaacacctcgacctcgagctctccgtcaaatcggtccccgacgtccgacgcgcggtggaacacatcaacgtccactcttcccatcataccgacacgatcctgacctcgtccgacgtcaaggcgtcctactttatccgcggggtctcgtccgccgacgttttcgtcaacgcttcgacgaggtttgccgatggacagcgattcggcctgggtaccgaggtgggcatctcgacgggcaagacgcacgcgagggggcccgtcgggttggaagggttgtgcatctacaagtgggtcttgaagagtacagagagggaggggagcgtcgtcggtgatttcgcacggggagcggcgggcaagacgtatacgcatagggatttgaagggtaaagaggcgccgttctaggcgagtaggagtcacagcatgtacatcgaatgggtataatcatcatcatcattatccgaaccgaagcgaaccacgtcgttacaattgaaacgaaccgacccccgctccgtgcgcacttgaattgacgattgatgattgacgatcgacgaccccgactctcgtctcagcagactttaggtaagaccaaccctcgacaacctctgctcgtcccccacctcctcctcccgcacattggcgggggggcggggggggacggccaggacaatacgagcttgactctgtgtgttgataaatctcatcattgtgagagagtcgggtcgataaagatcgatcgatcgatgtgtgcagcggggtaggaaggcagggtgaggggtaggaaaaggagaggtccgagggagaagggtgatcgacgagggagagacggacggacggatgaccaggtgagatctgttttgtgcgaaccgcaagaagaaggaattccgggggggccaaacacgagctgatagacctcgcgcaaagacgtcgacgtcgacgtcgacgtcgacgagggtctagctcgtggtgtgttcccccgggaatctctgctctcaacggttcgccggttgtcgaccttttcctgggattacgatcggggtctctccttgatgcgatatgtggtggtcgagcaagcgaggtagtgaacgagcggttcgtagggtacgtcgaacgagattgatatgaatctttgtagtccgaggagagatgcacggtctatgggaaaacgttttgaatgcgcttaacgtgaaattggaacgatgacgtggatgttgatgaaccaattaaaagcgcaaaacccagcccgacccagccagctctacccagctctcgctactttttgatcgctttctcacgcgcgcacatcgatcagagcaccctttgtaccggtacgacatgcatctcgggttgaactaattacagtcagtggccatctagacaacgatcccacaacgacaagatccaatacaaagctcgatcgatcttgcaatccacaatatagcctatcgtgcaactcccaacccatccgtgtagacagcctcatctttgcccgccgccgcccgcccaccggaacaagaaccgatcgagacacacccctcacctctcatccaatccgctctccttcttttgatattggaaaggaaacctttcatgcctagttcctctacccacacaaacacctccatcatcgtaccatccaccaccatatcaccctttacgaaccgtcagaatcgccattttcggaatacaggaccggatatagatcgtcgtcttagcggataaaaacgaaaaaacgatcgtcaccagaccagacacagaccaaacaacacgagacgagactagacacccccagtaatcgtctacccacccatctcctttctttgtaaaagaacgaacacaaaagacgatagagagtcggtgacgagtgttattccaacatcatggctaccgtaaacattcgacgagatgtggacgacaagttttacgtgagtctccccgggcactcttcccggcgggtcatttgttgaagtctcggtgctgatgggtttgcgtcgatggtgaatcatttgattggggggtcggatacggggcatgatcgtagcgttacaagtgagcctcgcgatcccgcactggcgaccatcgtccggcaaccccactaacactccccgcctcaataggatgcccatcctgacgaccaagatcgaaggtcgagggaacgggatcaagacggtcatacccaacatggacgaggtcgcgaaagcgttgagtcggttacctacctgtgagtccagctaccagctgggatctagcgtcgggttcgggcggactcgcgccgagcttgaggcgctgcaccatcgaccgcatcgcaccgcaccgcacctcgctgacactgggctcgacgcgattcgactcgactcgcagaccctaccaagttcttcgggatcgaattgggcgcacagacgactatggccaacgatcgatacattgtcaacggcgcacaccaacctgaccgtctacgtgaactcctcgacgtattcatcgaaaaattcgtcctctgcccctcgtgcaaaaacccagagaccgtactcctcgtcaacgagaaaaaggaagagatcacccgggattgtaaagcctgtggagcgcagaccatgttggacatgagacacaaattgacgacgtacatcttgaagaacccgcctgccgggtcgtctacggggaaaaaggggaaaaagggagccaagggcgcggtggatgccagtgcggcgccgaaaaaggacaagtacgccgaggcagaggagatgagggaggcgcaattggcaggtacgaatttacctaccatcggaggaacgtcgagccccgccgccatcgccgccggcaatgggaataccaacgggtctaccccgacccccaacgaagaggacgaagacgacgtcgccaaggggttcaacaacccggccgtggccaaccggaaactcgacaatgacgactgggccgtagatacctcggccgaagccgtcgccgcccggatgaagaacctcgccgtcaacgtcgacggctttgcaggtggtctcgggggagacgacgacgatgatgccgagggcggcggaggggataccaagtataccgcctttggaacctggatcgacgagaacaaggaggacgctaccgacgccgagatcgccgccaaggccaaggagatggaggtctgggggaagcacaaggcgtgcgtcgaattggggcagaaactctggggggacgacctcgtcaaggacgtcgaaaagagggtcaagattttgggcgtcgtgagtcccgcgcgcgcgcgcatcctcgcccgcaaaaccatcaaggctaagaatccacccctttcccgaacgatttttccctttgtagatgaccaccaacgaaaaggctcaaaagtccctgctcggagggatcgaaaagtactttggaaacgatcatcccgagttgatccctcagttgcccaagattctcatggcgctctaccaagccgacgtcctcgaggaagaggtcatcaccacgtggggcacccacgtcagcaagaaatacgtcgacaaggatacgagcaaaaaggtcaggaaatcggccgagccgttcttgaaggtgagtctgaacaggtcgcgtccacgccatttgagaggctgctgacaatccgcgtcgatgtcaccgcgcagtggttggaagaggccgacgaatcggatgacgacgacgagtagggtttcgccgacccccgtgggttttgattgacagacagcgatccgattgtaccgaccgctcggcatgggcttcattttgtatctcgtacaacatctctcgccactcgacgtaaaagtatatatatatatatatatatcattggaaaatgctaccactcgtggtgcaacacagactgacgtgtggtattcgtttcggtcatcataatagtcgagtccgctcggatcatatcatctctcgagtttgtcgagtctcgcctcgagctccttcctgtccgcttcggcccgctcgtacctgtttttgaaacgagtacgatcggcacgacagacctccatgtcttccctcagcgagtctctctcgcggcgcaatcgtttgatttcggcatacatcttttcccactgcgtttgatgttgggcttctttggacaaccatcgaactttgtcctcctcccacttggtctccttggctttccactcggcttccctcctttcggtcgtgctcaccatgtccacgaggctctgcaaaacggcggtaccagtgacctccccggtcaacttgagcgacgtcaattcgaccgggatctcgacctcgaccgcagcagggcggggcgaatcgctcgacttgagcagattgatctcgtccgacgccgccctcaaatcggcttcggtgctggcacgctgctcggtagctcgcatgtcgacctcgatgtccatgtgttcctcgtcatggccgctctcattgtcgtcattgctgatcatgcccgccgatttggcaggcgcgggttggaggtggtgcacggggaccacccggttcttgatctccttgacacgagggtcctcgagccggcgactggaagggggtttcttctccaccttgaccacggtcggggcattcagtggcttctcggggacgggctcggcaggcttggccgagctcgtcgagcggtcgagggccggtttggaaccccagacggagccgtacctcggaccggtcggaataggcccagaactgctctgtctggcagctacagccggaggatgtgtagctgatggtaatctcggcatcgagacgccggacaacgtctgctccactgggttcggcggcaaagcgtatccgtgactgaaagacgattggagggggatggcgtttggattgggtttccctcccgatgtggagctcgaagcgaagccctcgggttgcttgggaagctcgatctgtacgggctctcgcttggccacgttctttaacgcatccttctggtagtaccactcgcctagatacatgtccggcccgttctccatcaactccttgtccagcgtatcgtacacgttcagcaacctcttcaactggttgacaccccccatcctgaccctgacgacctcgttgtatttgtcgatggagggccgtttgacgttgctactcaatccgtgccatcttctcctcatggcgagttccatcgtgtcgagcgtccattgcctactcccatgcctgtctaccccttccacctcgggatggtgtctccaacagacctgacacaacacaccccgacccgaatgatcggcctctagttgcaactctccgggacagatagggtacctgtttttgtacagcgcaaagtgcaccaagaggtcctcgagaatggtagggatcgagttcctcctgagttgcatcaaggcgtcgaggacagcaagacctggcaccgatcgtcgaatccaatcaacagccttttcccaccagaccgccttggcccgctcgtagttgttgaatccacgaacggtatgggggtcgagcggtttgaatgtggcgagctgggtgtcggcgacctcgacgttcgggttactacgacgacgagcagcagcagcagactggttcaccctggcggcagcggtcatatttcgagaccgtactttccccatcgtggctttgagtcagatgaggacagcgaggcaaagtctcgtagacggcagtgaaggtggtgaagagatagagaaagagtgtagagtttcgatggtgtctctgtctggcgtccgtgcttatatacaccaaaggacggttcgggttcgaccggactcacggtccgtcatgagctggccgtatcccccccccaccagccccccccccccccgatcgatcgtcacactcggggctgcgatcgagtcccgattgattcctgtcggctgtcgactttttttggatatagattcccacgacgtatcgatccgaaacgccattttcgtcttttcttcccgctcaccgtatcagcacgcccttacgccatcaaccagggattaaaagtcgtccccccgtgcgcaaaaagcccggtgggaccggggagacctcgctttcgcaacgaggttcgcgagtcgtggcactactcgccaaatgagatgacgcgcggtggaggttcggatcggacgacgaggcgctcgaggggcgtccagtgatgccgattgacaggttcgtacagggtttcaagctcaagatccttgaacctttccttcgtccttataagctgaatcgtcgacgtgaacagcaaaactcgtagctgcattcctccctgtcaacccgattccacattcacttatgctcggccgacaagatttgacctcggggatcgcctcgggcatctcccgctcggaatcatttcttttacatccgaagacgatcgagtcaacaatgccgtaatcaattcctgtgcgagccgtcggggccctgtccgctgtccaccttgcgacagcctcatcctctttgaaccagcatttcgaatggctcgtcttccctatccccagaaacatcgactctacaccacgggtagacggcagactgcgatcccgagacttctcacgagatgaaacatccccgacttcccctgatctccattccagggaacacgcgggtctttccgctcggagtcgtccctcgagcagataccccggcgttgctgcggttctctgaacgtggattacggctcgaatcggatgggaatgacggattggcgatcgtggggcacggtgaggggaggagaaggctcgtacaagtgagtcttcagcaggtccttgcaaactgaccgtttggggacagccgtctgattgacagctcatgtccatctgcagaccctgctcgcgaaacacaagttgcacccggccatcccctttcccggtgcattcccctatacaacctcgatccctgaccctccgaaccctctgatccgccacctgacattctctcgaccttcacctacgggagaattcaccgattataccgcacggtatggagcgttgcaggaggaagatcggtccaccctcttggacttttacctctccatgtcttcttcaccgagcgtagaacagatcgagctcgtcgccgagaaactacgcataacgcacctcttggacgtccccctcatcgggctcagtagtgggcagacgaggaggtcgagattggcggcgtcccttttgacgggggcgaggatggtgctcctcgaagatccctttgccgggctggacgtgggcagtcgcaaggacattgccgagttgttgggcaaggtcaacagtgcaggggaaagcgggacagaggagcaaggtaggatgcgaacggtcttggtcctccgcgggactgggttggtgggcatgccagaatggatcgacaaggtcgcaaaggtcaccgggtccgacgtgtggacggggtccaaggaggagtatatcgaccgagccaaatcgcataacagcaaagtctacgcctctgccgaggtttatgacaagtcaaaaagcgtgggaaaggagaccgtcggacaccaggagcgcaaggaaccgctgatatacatggaggacgtcaacgtcgcttatggagccaagaaggttagatctgctgtgccgctcggacactcccaccatcagaactgaccccatttacgccatgcaggtcctagacggtgtctcgtggtcaatctatcccggagacaagattcacctacagggagctaacggatcgggcaagacgaccatcctcgccctcctccttggccatcaccccaggtcatactcgatgccagcggacaatctcaagatcttttcccagccacgaagagaaattcctacgccttacctcaagcgttggatcggacacacctcgcccgagatctttgcggcgttcccacgcaacatgcggctgaccgcaggagaggccatcggatcaggctacgagggcgttttttctcggcgggaattcactccagatcaggtcaagcggatcaagtctctcctacgtcctttcgaggaacagctaggaacaccgagtcgggcgtcgggtaggcaagcttcacatacccgaaccgacgtcgactcgatctacaacgccgagttctcgcactttcccgcgagtcagcaggccattctcctctttctccggtcggtcgtcgctcggccgaggttgctcgtcttggacgagttcagtcagacgatcgacgagcaggcttgggaggtctgcaagaccatcttggagaacgagtggaaggagatgaaaagcgacggggtggatcaagccgtcgtcgtcgtcagccactacgagtcggaagtgccgtggcaaggtggcaaagtctttcggctgaaagacggcaaggtcgactagtccgagtgaggacggtacatacattcgcatctaataacagttgtaatcaatcacgcataaggctacatgcatagtctgggaatcggcaacgtggctctgtcgatccgcgtgaatggatggacagctagggtcgtgtatcgcccttctgatccgggctcttctatctttctctcgcttccagggccaggtgatctcgtgctagtacctgccaagacccgccgtcaactcgtccacctcccaccctccggccagaatctccttgcctcgctctttagcctcggcgacgtccatgaccgctcgactgctgtatcccagccggtaaatccccttgtatacggcaacgttgaacaatcgccctggcacacccgctgccagctccgaggtcaaaccgatcaaggcgagttgaagcaccagtccagggcaagaggtgtacgttttgttggcgagttcgccaaacgccctggatccctcgatggcgggtggaagcggctcctcggagtgtgagagcatctcgaaaagggtggcaaggaagagcacgatcttgatgttgtccgcgtgaaacgtagccggatgtgtggaatggcaggcgtggccgatcatacagaagacgacgttgatcatcccgaccgtgacgcccagaggtatatccttgtatgacacggcctgagcgactagaacgatcacgagggcgagctgtgatgggccgctcgaagttcgggcgacgagatgtagccagcagaactgctggatcggaatgacgattccgtggactaccttggctgtagtcgatccgtgaaaggtctcgtagaggacgagttgcaggtcgaaacctcggcgtccgaggttatgcacgggctgatacgcgtacggaaacgatccgaggctgaggagccattcgtgatcgatgatcgagagtaggtagaatggcgcgaggaccccaatttgcatgtcgatgaggagaaccagggcgcttttaagagtaatatgctcgatcgaggaccgatagaggcacaaagggctttggatggtggcgaagataatgcccatggcgaagagagcgacacgcacaacgatgcggagacggtgaatcatttttcaggtcttttcagatgtttcgattgctgatttgagtgaggttttgaacctgtgcgaggtggtattgcgcaagaaggtatcgctgtgagccggtatctctaggggtatgtcggtagggtatatagctagatcatcccagcgatctgaaccagcctggatctgtactgaacctgagccagtatgatcgcgatgatgttttcggcacagccgcacagcctcatcaacgtcaaggtttttgagagacaacagctcggttagtttcttgtgtcttccaggtcgtacggccactggccaaccttctatatccgtcacatgcaaggcgcaaaaagccccgatcggacacaaggttcaaatgtctcatcgaatgatttctccgtgtttctgcctggcatgaccccggagcctgtcgggacatgcatcgggccggacacgaggcgacagatcgaaaggacccctagaaactctcggttccgtgagctgtgctgatgactctgcgcctggacacgcgcgtgaggagggaaagcgtgatgaaactcaacaacaaggtcaaagaattggcgacgagatcgatcgatctcacaggcatcaggtgagtgttgcattttttcatgtcttggatctcggcagatttagacaactggatggctccgtacgccgctaccaccgaatgcccgaatagatggccgaatgtcgttcgcattacatcaagatttgccgatcggtcaatcttgggattcagccccggcgatcaaatgtctcccacgaattgtttttggccatcgactgtctttccttctccgactcagcttgaaatttcctcttcccttcttgctggagcgatggaagactacaactgggaaggtcgacgtcttttatcttgtttgtggactgaccggcgccagctctgaaatagaaataccggtagcgtgaacattcactttccagcgtcaggcaggcttgtataattgcgaagagcagcagtagctccggggttaaggtagacaacaacaatgccgctccagcagattatatggtcgaattggcctgggaaaaggctcacaccgctgaatacaccctttgtaggaccagcaccctctcttcgtcgtgagacgaatcgctctgacgtcttcccacatagaacacagtaggacacggaacacaaatataaggcattggatccgctcggttcctagctctccgccgccattgagattttagtgagagtgtaagtttccgagatcaccgacgaaccctgcaatactcttctcgatctctttcgctctacgtctggctaaatctccagatttttgtctgaacaggcggggcatcccattgtgtgcgtgtagctgtagaccccttctggccggagatcatagatacttcttgttcaagggtaataccacttcgattgacacacatctttttcttgaatacttcctgccgctgagacgtattgtttttgcacaaagatacatggctctcaagactacacgcatggctgaataccgcgactatctgactgccaaatacatgtctcagttctttgtaaggtctatcgctcagtctgtattctcgggctcaacagaacgaccatgtctggcgtttttgtgtgctgtcgtcgggcgatatggtggagagcagtggagatccaaccttgagcgggaaggtaaacctgctcagttgtcagagttggattgtttgaattttacaagggtatgcacatgaagacaagtcgctcatctgaccacaaatgcatgtaaaaaggttgccatacaggcccggactcagatgccgaggtcagggttggaagatatgccaagggcgatcgaaagaaggtgcaacggtgattatgatgaggcccagagatccagagacagtcttggaatgggtcattcgagaagttgaccacctctatgtgctcataggatgattcagaagaacgtatttcgttggcgaaccccgaaatcaagaactgttgcccttgaataggcagcagtcggctgatttagaacagcttcaaccttcaaccttcgcatctaaggtttctcttgcttgcgaagcggtaagttggcgaaagcctgtagctcactgcaagcttgaagtgcagttcctctcaaaagtaaagagaaccggcgccgtgcaatcgcgatgatcagctcgtgtcgatctgccccgccggtcgagctttgacagcgatgtgcttctttgatacccgcccaggttcgtcaggggctcgggttgaattctgatcgattcgccctccatttcgctccagctcaaaatgtttcgatcggtccggggtatctcagtaatacatgtcatcagaaatgctcgtaagggggtcgtaggggattcgttcagagtcgcgagaggtcaagtagagatggtgcaaacgaatctagtaggagccacgagacgactcgatcaggatgaggtagttcgacaacgtcttgaccggatgtccactcacaatctcttacattcccaatctactctccctggtcataccagctcgagcctctcgattgacttcgatcatgttgacagcttgagaagaagcggccccgtccttttgctttgcctgaccgctcgtgtatttgctaccgatcgcacccgtaggttgacctgtcgaggaggaagagcctgatcttttctcctcgagtcgggctacgaaatcagcgacgtcttcttgtcggagagggacttcagtgggagttcggcgaatcattggatatagaagtggcgtgcagaagggcagtgtgcggtagagaaaagccgaattgctcttgctataggtcactgcctcgatgtacgttgtaaccgtatcaatcattatcatagggcgtgtgagaaagtagtatgcgtacgatgacccccttagatcaggcaagtcccgtgtggacctcaattgtcaacaaacggggtggcatgcggacatgggataatagacgatatccgcgtctacctacaacagctcattgggcccgatatacagacaacccaatcttggcgatatccatcaagatcgcttcgctaccccactgtcctgtcagactcgctcctactggccatccgtccgcccctagtcctactggcagcgagacacacggcaaaccgccaagtgaggccgggaccgtcagcagatcctgggcatatccacgagcgtcctggctattcgagctggtcgattcgagcgtgggagcggtttgaatcgcggtcaagtgcaagtacacgtctacccctcgagcgggtggctcattcgtgtcatccagatcgagaggatggctagatcggaagatcgcatttaaatcagatctgagccgttgtcgcagttgcaaagccttgaggtaagaattgttgaaagccctgtatggcgaggcgatgtgagcatatggggagcagtctttattcaacagagacaacactcaccctgccgtcaaggcgtatgttccggccaatatccgcttcttgacttcttgtccgaagccccaccgtctggtctcttgccggcggtcaaatccttccgcctgtccctctggctcgctaccttgaccaccataccacccaccaccgtatcgcgctagattgctgctcgcttctgcacaagctagcacgtaatacgccggtagagccagacggacgctaggaatactgatcggcagtatcgtcgcccctagggattgaagatgtcggataaaaggcaccaagtcgagaggtgtcaagtctttctctagacatgtttcctgcggtcggtgattgcactcagtttgagctggatgtaatcctcatactgttttctcacgatcgggattcctattcgaacaccgtcgagtcgcccgtcctgcaggcctttcaaagacctcctcgcttcgtattctacaccttccgatcgatcgcgtacttctaacgatgcgcagctcgggtctctcggatccggttccgacatgacatctgctcgaatccagccaaggcatgtcagcgaaaacaccgcgtcgaatgcgcgacgagagaacgtaccgaaaagcagctgggcgtcgtccacttccgacgccatgatacccacgcagtctagcgtatcagcatacgaaactacgccgtacctggcaccccgcatacgattcagcttgggcgcgattcagaacggaccgaggttcgactcaccgactgatcatgccatgactaggtttgaggccgaccaatccgcaataggaagctggtagccggaccgagcctccagtgtccgtaccgagagcactgtatttaaagagttggccttagctttcggcttaactgttttcaaaatcccctactgtaactcacgcccatgcctgaccagctttgacagctgccgcgctacctcctgaactacctccagccgaccgtgctccgaaagtttccccttccggatcactcgagccagacatcgaaggattatggacgggtggtgctcccgggggaaggttattcgtcatactgcccatcccgaattcatccatttgagttttgcccacgatggcagctccggaagacaagaggctcttgacggatgtggcggtgtagggagattcgaactctgagcgatccagcgtccaaagagtcagctttctttccccatcctcagcatatcacggacttgccttgtagcatccgggaggaacatgttgtgcgagtcccacgaagaaggaaattgtccttaatcgcgatgcgtttgctcttcaacctttctgacggcaagcagagcatgaagacggctccgattaggttcaaagatggatatgatgtgaccgctaaaacatacgatcgatgatctgctcagctttggcttgaatgccctcgcccgggtgcacccaggtgaacggcgtcgaagatccagagcctgcccttgctgcggaaagtatcgagcgactggacttcatagtggggtcaggtctgagtgactaacgtgcaactttgcagtgtcaggccgaaatctgcacgatctgatatgatgtccgtcaggtgcactcaagatcaggttagaacatgagttaacaacgttaatctctacgattcccaactttcctgcttacgtaatatctcgggcaatgtcatattccctcccagcttcccctctccgatcgatctcgagatgacgattatgatcaaattcaacagtttgagcagccaacaacgttacaacaagatgtacagcttcaaacgaggttatttgttgtagaacaaagcttgaaaaggatagaccatgcctgatctccgccgcctggcacaaagctgtcctccagccgccgtcgcggacgatctcttggcgatcatcaacgcacaattgaaatcgttcctccagtcgaccgacgtaaaggaggtagcagatgacgtcttgcaatacgtcgccgttggcctcaacatccatgccggacgatcacttcagaacttgggcactttaccaccggtcagggctgacctgctgccattggagagcttggtcaagctggtcgacctagctcaagagccgctagaagagcaccttccgactctcgttctggatgccgtcctggcgtaccctacccacgtctccaccgttcggcaattggtctccgagactttgaaaagcaatacatcgttcggaacggcactaaagcaagaagtcatcgaggcgactgtacggctattggagcgagaaaactcgagagtgctcaaatgcgagaaagaccaggattctggcgaatcacacatccctaaactcgtctactctctcttcatctatgcacgagcacatcaggatatggcagcggccatcgtcgatgctcgaaactttttcggcatcctcaaggtcacctacgaggtcatctctagcttgccccccacctcgctcgatccgaccaggaagattcagaccaagagtcatttgttactcctcctgcataccttgctcgagccgctaccaccgtcggatagggaatggaaactcgagatgatggatgagcacggacagaacgacggcacagagacgctcgtcaacaccgggatctgtcacgattaccacatcgtcttcaatcaaaaggccaacactcggagtatcggggaaaaacagatggacgccctgagatccttgagctcgggaatgaagctgcatactcatcaggaagacgattcggtcatgatcaaggtctccgccgacgtgagcatgatcgaggtggatgtgctgtgccggcctcggctgaccttgttatcctctcccgcacagcatcgaatagccccgatcctcgttctgtttcccgatatggccccagagctcctgcacgaagctctccgtcatccgcggttcgcacattacaagggcgagaacggcggcgaggacgatccggtcactgtcctcacgaatgccatgctggacaacacgctgccacctgaattgaaagagctcggtcggcgggtacgtggggtcacacaaggggaagatcgagagggcgggaatcggaatgcctctgcagaaggaagtcgggagagagatagacagccgagtccggataaatcggccaagaagactttcaggcgggacaacatcttcaacgacatgcctatggacttttcgaagctcagctttggcaagaacgatgggtaagtgaagggagcgctgccgagggcttgtctagatgatactgatcgcgagaaattcgacggctttccagcgacctggattcgtacaccacggcggtgcctgatcatatccgacaatccatcatgcgtcttactgagcagcaacgatccgaggaagaagctgaacgcgaagccgagcgtgaagaggcgagggcaagacgatcgagatcggctgctgccggtccatcaaagacgaaggagtccaagatcaggaccgttgcgttcgaggaagagctggacggggacgatttgttggacgacgagacggacgctcttgaggctcgcgtgcggttgaacttgagggagggagaggaagggagcagtgatggagaaagctatgtcgattcagaagaagacgtgagctcaaaagccatttaggttgctatcctgacgttgctgacctatcttgtgtttcaggacgagatcggtgcgggtggatctgaagacgtgtatctggaacaactttacatacagaatccgagcgcgttcgagcggaacgctaccacgcgaagaagcaagatccgcgaacagatgcggcagcagaccggtacgtactggactgccatgccctctgcgtcgcctccgatctgaccggtgacatcgtacaggctggagtgatgaacagctggaaggctggaagatcatgttggacagaaacgtgagccggcatctcaggttgcaagggatgtggaggctaattccaccctgcctcatatttgtagccattgaaggagaagattttgggccgacatggagacccgagaggtaacaggacacccgtcgatcgaagtggtggtggtggccagtccaaccggggaggtggaggtggtggtaggggtggaggctcgaacgatagaggtcgaggtggaagcggctcatcgcccccatcaaaacaaacaatcgggtacagtccagctacacaagcgccaaattgaacacgcccccaatctcgccccatagacgcttcagaaccgattcatcatcaaccaggccaccaccaacacccgccgccaccaaaaatcctcgggtccccctcaacttggtccttggtcatccggaatgacttcgcacgagcgtcattcggatcactcgtgacaacaacaataatatcgacgacgacgacgacgacgacgacaacaacaacaacaaattccagtagatccgcaggccaacacccagcctcccccgcctcccgacatggtcagcctaatcacttgaaaaccctcgctccactaccctctcttctcaggacgatccccagcaacgcgtcatcatccttgatccttgagcgtccgaccagatctagagtttcggccgggggactagggtggacgggcgacgtgtatacaaagtcgggcggcgcgacagccatgtacgaccctttgttaggcggacaggtgaaacgtcagaagggggatgatcgtgatgatacgaatacaggtatccggtgctggccagggcaaggtgggggatatcaaaggggtaatctactactatcagagtgttcttgatgacgaaccgtatgatcgttgttatacctagccatcgtatatcaataccgtccttctcagatcatcgacccgtgtacaagcatcccatacaccgcccaaacacacccgcccgcctgtgtacgcttccccgacgcattcctcccccaaacccacccacccaaccagtgtattttctctctctctcattcagaccgagagaccgttgacatggcataccagacccctcgtatgatgacacccgtggggccgggaacatggtgttccacctggcccatgctcgaagtgagcctccctcctcttcgatctatctgctacgttcctgcggatcactccctcagatagccgtcatgatcatcgtcctgctactcgtggtcacactgtcgggagacggagatggtcgacaatcatgctgatttaggaccgttttctctcctttggtcgtgttcgcgtctggtcgacgtggggtgcggttgatagaggccaggtcatgtaggtttcgggacttacggggtgagtctcctctccgatcacgacttactggtagatttgtgttgagggccgaggaagctgacggatcgattgatccctttgtcccgaccgctcgtttccctaccctcgggcgtactggagtacagcgctatcacagaccatacggcgggtaaaatctctctcccacttcacaccgtccattcctccggatgatcattgactttccagccgtacaccctcccctcaggctctactccgaagcatcaaacacccccgtcccttctttccccttcccttccccgctcttcgcacttcctgctgggacgcaagggatgtcgcagatgaccctagcgttcctcgccagtcgggcgatccgacaaggagccgtcgtcgagggctggggagcgctcggtaggggagtttacgggagacctcaaggtgagcgttggtcgaatcgtatcgtttcttgtccacttcgaacgtggtcaagaggccaggtaggcgttagtcggaggaaaggctggactgatcgtggatttggcgatattgacgttagggcaaccgttaccgtgggcggctcaggctgcaacttacgggccttgatacggggaaccgtgtcggatttggatcgaggacgcttgtacgcgacgacgagtgtgtgaccattgtacggcgaatcgttaactatagcagcgttcgcgtgtgagacacgtttcacttgggtaacatgagaaattacaatggtattgatggtggcggatggctcgctagaattggcttatacagacagagggaccgatcgaagtcgaacatagcttaaacattgcacgaaatgtaatgcgatctcctgtctcgaaacggcgacgttgttacgcggaaaaagcctcaatcgtcagcgttattcaccatcgaagtcgaaaggaggtttcgcagagtctcgagaaactggaacaaacgggaaatcagcgggtgcggctgtcgacgaccgactcgtcagcgttttcagccgcgcagagctggtgtcattaacaaactgcggacacgactgtcaggttgttgacggaccgacgcctgttcatttggaccgacacataacgtagatcaagatgttgttcctgcccaccctccttccttggttgctcccctctttgctctttgaggagagtctttactggctgttagctactatagcagcctcgtcttgagtcggtctacacttcgcgttccgttggctgtgcgacattatcttcagagacttctagcaagcagggagaagtccatcttcctatagacatcgataatctgacgcccagcttctcctggacctcgcagacgttgcacaagcagatcccatcatctgaaaagaccgcccatatttgtctctgtgttcggtaacccttggtcgaaacacctcatctcgggaccaacctgttgacccatcctttgagcttatctgataggccgatttgtttcgactcggggggctgagacgcgcggatcgacccactcgatcgtttcgccatccttccttttcgcttggctgggtaaagatggatcgctggagatccgagcaccctcctttgatatgatggtaatgcgaagcctttggcacacggcacgattttggcgactttttcccttccagtttccaatgggaagtcaaactggacgaacaccccctctttgcgagatgacacgcagactgcggtgcttacaaggtcaatgggcgtcgtttttgctagctatgatgtggatacgtgcacaaggacacaagaaggcatgtgattccgaaacttgacggctcgaaggactagaccgcagcgcgacgttcagatggcggtttgaacgaatgtcctcaagaattctccgcaagcaggcggtcaccgcgaaaatctggacagagcgacggagcctgtcatgccaaacatttctccgcacattcgtaacacgcctcgcctgtaagacacaggccgaacgactcgtcgtgtatcgctaggcctccggtcaggtgcggcttcagacccgatcgggtgtcgccctctgttaatcagataacgcccagccaaacgcggaaccaaaagtcgagcgaaaaggaaaaatggcacgggactgtgagtggtggcagagtggagcgtgtgtgaccccgatcgctcgtccgagcaacctggatctgcgcgggcgagggaatttgagggggcagtcggtcgaccaagatgggctgggcaaggtgatccggatctctgattgtaaccgtacccaatcgaaagctcgagccattgtctctcttcggttggatcggtgtcgggcttccacgcaaccttggcttgaattccacccgatcctaaacattttgtcgacgcggggccaggagcgagggaccgacggacttgagcgcggaagctgtcctttttggttctggtcgtcggcgtcgtcagcctttccgtgactggcctcgtgagctcgggcacaatatcgatcgtccccccccccccgcctctctttgaccgcccacgcttcgctgcacggtaatctgataaaaatcgatccgaaaattctgctagctgctgaccgaagagcggagcgcacatgatccaccgcggaccccactgcccgttccgatcgtacatcgtgaaaaccatatatatacacccaaatcctctcccaaactcgagtagatctcgttccgatcctcgtgttggactagtgcccaaagcctcttcgttcctctcctctaagttgcccaattgaaacctccttccaatgtcctccaaggagtacgaacacgattcggagcacgatctccacaagcgtcaacaacaggatgctgaagccgcagggatccctgcgttgagcaacgtcgatgtcgatatccctaacgatatccacgagctcatcgccgacgtacctctggccggtgtaaggcgggtcgagaccgtccaggccgtttggaccaagaagagtcgatggatcttgtttgttgcgtaagtacagctcgattgggtgggacgcatcttctggccatcgtttgctgaccagtgacgacttgtgcgtagcctcggtcttgcctcctacatctactcgttggacggaaccaccacctggcaattcgcatgtaagcccgcatgagcccttacttgcaaggctctccaaccctagctcactctcacaacgtccgcttaaacgcagtctatgccacctcgtctgtctttgccaacatgtactctggatccatcgatactgcctcggccatcattatcgccgtcggcaaaccgttgatggccaagctctctgacgtgtgagtcgacaatcccttgctagacttgtggaatcgcagagtagtctgctgacgtcaagcccaccgttgtattgtgcagattcggtcgtgccgaatcgtactgcatcgtcattgcgctctacaccatcgggtacattgtcaaggcttcggcttccgatgtcggcggtctcgccggtggacagctcgtctactcgtaagtccaggtcggtcggttccatgtcaacgacatcgtctaatccgctgtcgcttcgtcatcaggttcggttacaccggattgcagttgctttcccagatcatcatcgccgacatgactacccttaggtggcgtggactgtccaggtaagcgcgtcgagcagcatgccgaaaaggtgtttcaaaatcgctcataccagtcttctgaaatcgacagcgccttgctctcggttcccttcatcatcaacgcctttgtcgcggccgagatcgctcaggggattttgcccaactggcgatggggatacggcatgttcgccatcctcgtacgtatcatcgtccgcaagccaatgtcatacacgaatctgatccgtttcctactacgacctgacctccttctctaggtccccgcctgtttggcccctatcgtcggtgtcatgttctgggctcagatcaaggccaaaaagttgtacaagtccgagattgccgctcagcgtgaactgccccgaactcccattggaaccaccctccgaaacattgccagcgagatggatctcatcggattgctcctcgtcgccacctcattggccctcatcctcttgccattcactttggccaagctcgctgatggtggatggagcaaccccagcatgatcgccatgctcgtcgtcggtttcgtcctcttccccgtcttttgcttctgggacgccaagtacgccaagtaccctattgtgccttacaagttcctcaagaaccctaccatcttggcttcttgcatcatcggtgagtctagcgccgtgtaatctcctccggaacatcgttttgacgctgatatgcccccatcgatactctaggtttcaccgactttgtcagcttctacctgcagtacaccaacttgtacaactttgtctacatcactcaggactgggactctcgatacctgtcatacttcgggtacacccaaactatcgcgttgaccgtctttggaatcatggctggtgccatcatgtcttacactagggacgtcaaggtgagcaatagcaagccttccgaaaccgctttgacatggactgacgtctttcatcatgcgaccgtcttagtggatcatgttcagcggattggtgatccgtctcgctggtgtcggcatgatgttgcactcgcgtggtgctcgaggatcgaccgccgagctggtcatcaaccaggtcttgcagggaatgggaggtggtttcgccgctaccaccattcaggtcgccgctcagtcccaggttccccacgttagtgagtacacgatatcgacctgggtccgagtctaccaattcgatgagctgattatcttctttccgcgttacaggcgttgctaccgtcactgccatggtcttgttgatcaccgaggtcggaaactctgtcggttctgctggtaagcatcgatatgcccggtcttgatgatcgataggtcgactcacttctctgttcatgttctcagccgccgccaacatcttcactacctacatgcccggcgctatcgccaagcacgtacctggtaataatgccactctgaacgccgagctctacgccgctcctgctgtctacggtcgagtcgtaagtttgcgcatggcatgtcatcacagatgaggcgtgagagctcatcgcttctcgttccatcagtacgaactcggttcgcccatcaggcaaggtttcatctctgcctacgaagaggtcatgttcaagcaagtccttgccgccaccatcgtcgccgtcttgccccctatcgcctgtttcttcttgaccaagcgaatcaggctcgaagacgtccagaacttggctgatggacgagacttggccggaaagaccaccgaggtgtccaaagagttgggcgtcaacgattcggactcggaggtcaggcataagctttaaccgagtgcttttagagtttcaaagctggccccaacaaaaccatccgaccgctttactaggtcgcgatcggtacattcctttttataatcgcctgtttcctttgtaaacgaggtcttacctaccatagacgacgaggtccccagggtttcactcatgacgatatgatgaccatttggaactcccaaaaacagagcaatcgatacaaacgaacgaaccgagctcgatacaacgagagaccttgacaaacatgtatacccagaaaacggcctcagtctactttgtcgggatggccaaacatatcgcgatccaagcaatgccccatacggctcctaccaccaagatgtctcgaacgacctgacgatgtagtcgaatgacccgttcgtccacaatgacgatctcatctccaaaaacgggcggtttctgatgcggctcgacgaccacttcggtgttcttttcgcgaagcaggcgtcgcaagaatttcgactgttgtagcccggccgattgccgcctctgaacggccgtactagtactcgcttcggacgcttctccgtgctcttccttttccgaaacgggaaagatcaggtgcgtgttggaattgccgatcccgctcggaggttcgtcccaaggcgagatgtccgacatgtccccgatgctgtaccctgctgcgagcctcggttggtgatcgtcccaactatgcatcgagatcgcttgttcagggctaccttgatgtcccgaactcgacccggctgacaagggatccagggggtcttccccctggtcaggcgcacccggtccaccgaacgtcggcaaccaagaaaccctctcggcgtccatctctgctgaacccttttcgaccgccagaggagatttgggtgctgaatctgcccatggatccacccagcctcctccttcgaggtccacgctgcgtctcctcggatgttcggccaacttgaccccttgtccgtccccagcctctaattcccagggatgcaactgcctagaagtcctgccccaaacctgcgtgcagaaccccctccaagccttgatcccggtcgaataatggaaaaccccgtgccatcagtcgccaaacccaacctttcccccgtcgcgcttcaagcatgcggactcacggaatacgtctgcatcgcgccaaacgaggcgaaaaggacagagaccaaacggggtgctctccatccgaacgatcggccggggaggaggacgaccatcaggacgaggatgaggatcgaaatggcgagatccgtcagtccgactccgtacctatcggtccgtatagtgtccagcggcaaggtgagggtgagctatcaagctaacgagatgatggggccgatcgtagggcggggggactgaccagaagacttgtttcggaaaattgatattggtctgcgcatatgataaaaagtggggcagagtctgcatctcgaggaatccatagatctccttgtaaacgggcaagaactggtaggaaacgtttcgaccgatcagcctcgaagggacctctctccgaaccctagcgccaagctcccaccgatactgaccacctctgggtgcgtgctcccctcgagggcgaccctacacctcgtcctcatctcttcggtcacgttcaactctctctccgctccctgtttcaaaaacgtttcgaacgctcgttccgcttcctcgcgcatcggttggtccgccggtctcacttcgggcaggtaagccgacgaggggaccgagatggacaaggtcgggggcaaggtgaggttccgactgggtgtaggggatgctggatcacgttcgctctcggtcccctgcggacgggcggattcgtgctcgtgcatgccggtgtgggtatgggtgtaggacgacccagctcgtttgaagatggatttaagggggatcgagctcgatctcctctccccctcgttgttcaagttgatattgttctccgtccctcgtgttcccgtaaaagtctccccggagcctgtcctgccgatcccgatcccaaagacgctctcgctccgaacccgctgaactaatgtcctcctcctctccttgatataggcgaacgggctggacccatcaccgagtttgttgctgggtacgtccaccttgttccgttcagtctcggcgagctggtcgaatcgacgttggtacgacctgaaccagatgatgaagaggaggttctcgatagtgtattccttgtgagtgacaaagttctgaaagtcccggaatctgcaagccgcacgtgggtcgatggtggattaaattagattagattgaatcagatcagatcacgtcggatcagatcgacatggctagaacggggttgagagcgatccgacgaccggaaccgggactcacgagatcggactgcaactcgacccgtccagcacttcctcgagtgtgacacgttccaacgacttgttccccaacctcctcgccagtccgtctagggagggcagatgatcgtcttccctcttcttcccgcgttgtctcggtgtgagcctggccgtcgaggtgaacattgaggcggaaggtgatgcgtcctccgtcgtcgtaggggtcctcgtggcggaggtaacgaaggggtcgagggacgctgcggttcgtcgtcgtggttccgctgggaacgatacgctctgggtggacgagtccccgtcgagagcgttcgatgtggggaacgacatgatgtcgaagatcaagttgtgtcttgttgctctttctcctgttacttgttctgggacgttcaagatggtttgtcgagatcgatccgggtctttgcaaggggatgttcttggcagatccgccgatctcaatgacctcttgtagcaggattcaatcgctttatcgaatgggatggacgatcaagtaggacggtggtctatactggggtatgacatggtgtgtctgactggctgtagattcgatctgtacgtgagaggttcgagagtatgcctaggtcgagaggcgagagaaagagagaggtacaacgtatctaccttactacgatgagcattcgacgacacccgccggccggggaaccgagagcgagcgagcgaagcgtgggtgagagtgggatctgatgggattggttccgagagtgaagcgcgaggaaaaggagggcaggcggggggaaggcgtgagacgtcgatcacgggaacatggggtcgagcgagatctcttgacttgatcaatctcgttgcctttgctacgtttgttgatacaactatcggaaaaactcgacatttgatgacgatctgttggatcttttgatgatgaccgagggaagcagggagcaaggtccgagccgagccatcactcgagggggaatcaatcaaaaagtgtcattcgaggttaaattaatcaaacccacgcaacgcacgcacgcacgcacgcacgcacgcactagcatgactgccgcgcgctcgaccccgctgactccgcttccgccctctaccaaacccacgagggaggaccagctcctcgatcgcgtttcacttttcagaacaagttgacgtcgtcgtcatgttgatttatattcgttcatcatccatccacatcagtcttatcgataacaataatatgtacgtcgaatacttcccgtcgcctgtcgactaatttacatatgtgtccgcattgatcgccctagtctacgtcgacatcgcacattgccgtggcggacgacgagaacttgtacaatgtctcgccccgtctcaatctgggaaggcctgtaaatcctccttcctaatcctatgtccccgtccccccgtccgttgtgacccagcttacccctaatctcgccccttgactctccccacctgaccgaatctgcgcttcacactccctctcgaaacagtttctactacccaggaacgtccgacgacctcacccgctggatcctcgatacccctgtttcccggacccagaatcctcgacaaatcacgctgtacaccctcgtcgtctttcgtcctcccgctggggctgggacggacgagtacgatactacggaggacctcgacggcatcgacatcccagaccatcagggggagacggtgggattgcagttgaacacgttcaccgttcacccggggtacgcgaaattggagaacggtcatcgtgttccccggatgaacgtctttcccggtcagtcttcgttcgtgcacgggattttcatctcgatcgagcttctccccccccttccccttcgagcctcgtcgcgcctgacttgaggcgccatgaacacctcgcgcaccgaccggaatgatgaacctcttgctcccatcttacctctcctgctagactaattcggcccaaggtgatcaagctctcagctgacccacaaaacaaccccgccttcgtcttcccataggctgtgtcatctacctagatccgaagatctggacagtcgagccccatctacccgtacgtcgccgtgtttcctgcctctctccacccatcataatccgcggtcatacatgccaccaccccacccgaatatatacaactcgtaatcgacaatggctcgcctcgatgctctacatttgtctaataaataacagtagtaatacatatcctgctgtactgatgacagtcttcctgttgatgctgttggttgtcgcccgatagaccgacctgttgccagccctgcctgttcgcccgaatacggatggcgggcccaaggtgattcgtttcctagctcgtctaattcttgccacctttggtaccacttcccaagatttcgtaaaatgccgcagcgggtacctatgtcggcgcaagtcagtctcactcggacgtctcgatgagttttggtcgcaaaataaaggaagacccacctcgacgttccccgcgcccagccgcttgagcttggcttttcctcgacgttgtttcctatgatatcagggtcgcgaggatagcagacgagatgggcaacgagataatcgtgaatcacaaaatacgcaagaaggtatcagttctctgcacatctataattctccgcacgtacgacgtactcgagttgtttcatctaccagcccacccaaagtaagcgccgcgatcagctcaactggctcctcgtactgcgatgtcctatattctccgacccaccttgcgttcataatgccctccatacagcccagcggtcacatcctttttcatcgccgacaagctctccctcgcgataatcttggtcccgatcgccgcctggatcgagacctggaagagttgacgggggatgactttttctgcgagaccgacgagggcgaatcagggtcagatccgtccgttgcggtcggaacgctacgtgacgagccacctactcagtttggcgacccattcacgtccgacggtcacggccgatgctcgatggacgatcactacggtgagaggcggcacgtctcagcaaaagctcctccacggcaaaaaaggcaacgtcatgcttactggccaaagcgtccaccggggaggaattgaccaggaggttgagctatccaatagatgcggattttaggagaaatccaaaatgccacaccagactcatgtacataccttgattaggtcactcgaggtatagcccgcatcctcgtagtcaaatgaagcgtatcctttactcctacgtaggcgaaactctggtctttagccactgatgcatcgggggacactgcaggctcctgataactcaccgactcttgagcttgctaaagaactcggtggcgatctcgctaagaggaagctcgtaccgtaaggtcgatctgcccgaggcctcgtcgtagtggtagtcgagctggatcccacggtgttcattacaaagctccatcatatcgccgacgtgttctgtcgtcgatttcgatagaagaggttcagatcgatgatgcttcaagtcgatcgctgcgattcactgaccttgaggagcaagaatggtagcgttgactagatgacagagcccaagttagtaaggcgccagttcactgtacagggaagccatgactccagcttaccgataggttcctctacccgttcgatccgcatcgtagcatcatggttgtccggaaagagagcggggttcgatatgatctcctcccttccatccttgtacaccactggagcgacatcttctgattagccaaaggtccgtcttccttcgagctcgagaagagatgcgcccacctttataaggcacggtcggggccgtcacgcacacttccgcgccgtactcatccttgagcctctggaccaggacggacatgtgcaacgtgcctaggaaacccaatcgacatccctgcccgagagctgccgacgattctctttgtacggtgactgaagcgaagttcgtccgaccatgttaggacggacatcttcctggtgcaaaagcagaagtgtcgtgacataccacttcgatcgttcaaggtcaactggagggagtcagcacgatcagcgaccttgtatacaggtacgaagtttccactcgtcacgaaccctcccgatagcctcttccagtttctggaaatccgttgcgtccagcgggaacacgccagcaaagaccatcgactgcaaaggcttgaatcccggtaaaggctggatcttgttgttcggatgtgtgaccgtatctcccacgtgcgctatataaaatcaggagagattcgaccaacgtttaggatggtgtcgcctatggacccggcatgacatccgccggactcaccctcctcgaaatccttgaggttgcacaccacgtatcccacctgaccttcgtaaagctgccctgtagatgtttcttccgggtgaaagatgcctacctcgagaacttcgtgtttcttgccagtcgacatgaacatgagtttgtcgcctatggttagggtcgagagtgaccaggatcagccggagtgaatgtggtgcgatgaccgacgtgagagctgtctgtacttgcccttcttcaccgtacccgtgaatactctgatgagggagacgacccctcgaaaccgatcataactgcgcaaagtatgagccctcccggcgcgtcctccaccccatcgggtcgggtcgggcggctccgtctgctcgacgccacactcactaggtatcgatgatcaaccctctcagcgcatcaggatcctcgcccaccctcttcatcctgacctcttctgcgtcggctttcacgtcggccccgctcaacctggtcaccctgtccaaccaatcccccggtggaggtaaatgatcgatgacgacgccgagaacgtccctcacgcccattcccgacttggccgagatgtgcatatgggaggaagccgggatgcctagggtcgaggtgatcgccgcggagacgacggcggggtgggcgtgagggaggtcgatcttgttcaaacaagggatgatggccaacccctgagccgaggctgaacgttcgacggcgagcgattgagcttgaagaccctctgtcatgtcgtgtcattcgcaagttcaggttcaagtccaagtccagtagcgatcatcagaccaaaattcagctcttcctcctcatccaaaccttcccccgacacgcctcgagagataggaggatggaggggggggcgactcacgactcgcatcgaccaacaacaagcacccttcacacgctcccaagctcctcgagacctcgtaactgaaatcgacgtgacccggggtgtcgatcaaattgatgaggtattcctgtctatccgtgtgtgtccataacatggataccgtctgggctttaacggtgatacctgcacggtgcgaggaagaagtatgagcgtgtggggattcggtggagatggttcctcgtatgtgacagaagggtggacggagacgtacctctttccttttccactgcgagctacccgaaatccgacaagtgcaacgtaatgcgataccacatatcaacgttaaccaaacttgtccttctgtacgctcgacgacgacgacgagcacgcccaagctgaccttgtccagtacttgatggttcccaccgggacctctcgtgatcgtgcccgtcatctccaacaacctgtccgccaaggtggatttgccatgctgagatagaacggtgagagagagtaggtcgtatcagctcgaaatgtgcgttgttcaggagaagtgggtgggaataggggcttgcatctatatgagcgatgatcgaaatattcctaccaatcgtccgcgatcgacgaatcagctcgactttcctgacttgccaacaaacacacaaagacacacacacgcacctgatcttttctttggggaacacgctcatatccctgacttttgcatgaggatcccctgccgatttatcgaggttggtgatcttgctcatccccgggttgacgaatgtggacgctcgtcggacggtatggagctgccatgacgaagcgcggagacgcaggggcaggagcatcggacgggcaaggggaagaggggggagggaggaagctgggatgattaattcacaggatggaggtgaggtgtgtgtatagacgggtttgttgatgtcatgattactatattactacaggcctacagggtatgttgcttgtagagctcggtctgtcgtttgaaagtctctgcatcgatcatgaaatcgatcattttgcttccgagcacattatttacatccgtacgcgcgcgcgcgagtactgatttacatccgaaacatccgcttcccatatatgttcaagtaggtagttagagtagttagaccattttaccagcttgctaggaatgacctaggtagctaggtagttgcctaggtagtcatggggggaaaagggtgactactcaacttgttgtcggcaaaccggaccatagacctctagtttacaaccgtgaattgggagcatcgtacccggaccgccatccggaccgcgatgtaggatgtcggtggcctcgctgtactgcttacactgaccttgtccgttccaaccgcctcacaccgggtttgatcctctcgcaagtctgatcagcttgcggggtgtggaacgcccagggggccatggaagttgtacttcgatgcccaggcgggggatttcagggtggcacctgaggtttttgtacctttgaatgtatcttttttattgcactctttttttgcccaccacacttttgcccttgcccttgcccttgcccttcccgttcccccgtcaccgcatcaccgcatcatcgcctaatcccatccgaacatgacgcgaaaccggacgagaccgacgacaacgacgacgacgacgacgagttacgaaacgtcaagatcgagcgttccaccgacatattaacaacttgcgcgcatattcaactcttgacgaccacatcaattgagctatcgactagctacgaaactaccaaccttgaaattcttcacattgcgcgaatacgatcatgacgatcccaacgccgtccacccgccctaccaaacggatcgccgtcatcggggccggcgccgcaggtttagcccaggcgaaagagatcctccaggcattccaatcgggggagagcggctacggggtagagctcgtcgtctacgaatcgaggtcccagatcggtggagtctggtgagtgcaagatgctgcctcgcggcgaataggaggaggtgggagatggagctgatctgttcgtttggtgaaactatgtacggtcgatatctctctcctggggtatgatctggtctcaatctcggtctcggtctcgatcacgatcacgaatccaatgtcgacctggacatggggtgacctaggctggaagatccggaagcgggcgagtacaagctcaaattcgatcacaaggggaccacgagagcgttgtccactcgaacaggatcgagtccgtccccgatctacgctggactacggaccaacttgcccaaagtacgtacattaccctctattcaccccccgcttaccgctcgtatgccgatcccccggtatgcccaacctctctcacaacccgacccacctcgctcgctcgctcgttcgtgtccagtcaagctgatgatcctccccctgtactcagcaattgatgacattccgtaaccaccctttccccgaatcgaccgacctcttcccccgtgcgtccgacgtgtgtgattacctcgtcgggtacgcacggacgtacggggtggatcgatacgtccggttcgatacgaccgtgacgagggtatggaaggtgggggaagagtgggtgatccgtagtcgtcggcgtcgggcgggagggcagggtggggccgagcaggaggaggagagggaggagaggttcgatttcgtctcgatcgcgaatgggcattacgaaaaggtcatgatccccgagatacccggattaaagtgagttcgaggtcggcccgtatgctattatcacgtctacatcatcgatgtcttgcctggatagtcgattcgagggtacgatcctccattcgaggtggtacagacggcccgaagagtatatcggcaaggtgagccgcatcgttcagactgatcacacggtcgtcggcactgatgcaaccctcgttcccatattctagcgagtcttggtggtcggctcgttcgcatccggatcagacgtcgcccgggaactcgcctcggtccgagtccccacgtcggacctcccagaaagcatgcaactggctcggaaacgtaaccactcatcccatcccgacgttcccattcagggcaacgtcgacgtgttccagtcctcgtccatgttgcccaacgacatgtccccgtacggaaagaaagaggacgaaaagcaaccgtggaccaaattcatccagcatcgtccgttgatcgataggatcgaggacgacgtgatccatttcaaggacggcacgacgttggaagatgtcgacgtcatcatctttgccacggggtactactactaccttcccttttgcaaatccgaggacgcgccatggaatgagaaacgggtttgtgacgagactgtccgaggcgtcgatgtactggacgagatcaacgggtgggaaaaggacgggattcaaggactggccatgaaggggctggacgagatcaaggtgtttctcaaggacgaccggacgtgcgcttttatcgccttgcgtgggtatcgactgggacgaccgcgttcgaaagggagaagatgccgagctgatatcgccgcttggcattggcattcgtcgcagcttacctggtcgtgccattcccattggcagagatccagtcgcatctctctgcgctctattgggcaggacgacttccaaatcttcccgaaatcttgtctcctccctcgcgagaagaagtcgccccggccgatgagaccaaatctcgaccggagcacgaagcccagcaaggtgggaacgacacgactcacgatggagaacatgccaagcccggtaacccgcccgtgaaaaaggacaagcggcatactgagaaagtcaggggcgacctcgtctttgggttcccattcgagtattcgtacgaaaactatgtgctcgggttgacagccgaagccgacggtggccaaagcagtggctggggagaggtggaggactggaggtttcctctgcgcaagaataaggctttgcgcagcgagaccttgggatactagtagtccctgtcgacccatcagcgtcccacacccacgcacgcatttactcgatttcatcgtataagacagactagatgctatgcatacatgcggtggaagctattacacagtcggggagagccccatggtggagagaaataaaagattggacgagacggccgagctgtgcgagtgtaaatctagtaaccatattaaaaggcacagtcgggatcgcggtatgtatcgaggctgatagtggtgtgatgaaaacgtgggtcgtatttgggtaaacgtgaaaggaagtgaaaagtatcgctgatcgcaaggtatgagcccgaggaaggacaaacgtcttgacgcagtgtcgatgccggtgatgtgttatgctaggtcggatcaaaatccgaggtcaccgttgatattgtcgtgctggacggccgttccaccggagataaaagcgatgcggggatgaaaagtatggtgtgaaattgtggaggagaaaagggtagcgttggagcttggcagaggtgatcatgcgatcaacgtccgcgcaggcatcactgatgtcgtgagtgtgtcgtttcaaaatatggccaagtctgatgcacgcgagagggatagtcagcaccgccaacctgacctcgaggggatcccacgactccgaagactcaccttgagagacgtttgcacgggcccaatctccagcgaattgcgatgctcgcaaaaacttcttggtcgcgtactttttgtaaacgtactgctcggcgaatccgggcgcggcgatgatctcggtcaagatcctggcccccgcgaggagttggacctcggtgaatccagagtagaagatgaacccttccgactatggcgatacgtgaacgtggagcgaccacgttagtgacgcccagacgggttgaccgaggggatgaccgcccgactcacccaatcaccatgcaacatcctcctggcgaggtacatgccgatggcagcgatgacgctaggtttcgctcggaggaatcggtggtcgagcagagtgacctccatcaagtacttgctcagcgtcctggtctgcacatcgtagtcgtcggccttggatatctttcggacccagctgtagggcgagcagtaggatgaaatgtcaaagttcaaggtctgcatgaagaatagtgggcgtgtcagcatgcgggtctcgcgggtcacgagcaaggggtcggggatagactcgcctggaggatgattcgctctcccttcaagatctcgtccttgttgtatccaccttcggtcatgtaaacaaactcttccacgctatgacgagcccaagaaccgtgtcagcctcgaacccgggatgtccccactggacgacgaccgacgctcacctgggggcgaggatctcctcgtacttggcggcgatgaacatggcggtcacgccgaccaactggagcttgatcaacgagacgacccgggcggacaagaacctgtcgacgatgttgacggcgatccagagcgtctcgggcagcatgtggtatcgcaagtgtacttggagcaaccagtcgatcagggtcgttcgcatacccctgtcgacgaccaaggtggacgaggatgagtactggggaggataacgagtcttttacgaatgggcgggccgactcaccagtccatctcgtgctggaagtccatatagttggcattgggcaagctctccacctgtacacccaagacggaatcatcagttccccggggtccacctgcatcccacgttctcgccattgggggggtagactcgtctctactcacctcgagcgttcccatgagggcaaagatctcatcggcatactctgcgaccatggtacagtccaactcgtcgacgtcgtctacgaacctcgacctgacgtcgtccaactcggcttgagcgaggtaagcctgttcccgggtcaagcacaaccaatcgtcttgatccatctgaggagcgttggggtcctcgtcattttggtactgctcggcatcgggcgcgtcggacaacaaggcgttggcagagtcctcgaggtggtaatgcccggactggtgttgttgttgttgctggtgctgctgtcgttgaagatcctcctcggtctcctcggggatgggcaagacgtcgacgaccgagttgggaccaaacgcgtgctgctgttgatggtgcatctgtcgagtctcgagttcatcctcgtacctggccgcttcaccggcgtccatgtacctgctgctggaagggtggtcgttgaccttgcctactcccaactcggtcaaggacggggtcaacccgcttcccgaggacgcgccgctgagcttgatatcgtccctatcctcatcaaccgtgtgcaacgtcggcgcatcgctaaacgcagcctcggggtcgaccgagggttgacgtgatgaaccggcgtgtcggttggcgttcgaggaagcgaccgagtggttggacgtgctggcgatgatgttcaacgaggtcgaggtgccgaggggtacggtcggggctcgacgttcgggcttgttggttaccgagctcgatcgagtgtgcttcgagacctttcggggaggttgcgagtcctgcgtgggtcgaggtcgaggtcgaggtcgagtaggtcaaagacagaatcaaagtcgaggtcgaggtcgaggtcgaaagtccaaccaaagtccacgtaatcataaacaacaaacaaacgaatcagccttgtcctccttgaccaaaccaaacatccaaccagctctctcttccagttgatagcatcatcgtcgtcattggtatcaatagtaatgaggaagagggacgactgtcgatccctaccatcatctcgaaacgggtcggtcgatccgcgcgtagattatggatcaacaccacaacaaacccttcccgcttcccgcgtgtgccaaccacccccttgcgcgaaagtgtgacgcacaccgtggtttcccgcgaccgacgacgacgacgcagatgatatggatgggatgggatgtaggccagactcgaaaatgactcaccttggaagcaagagcgggtcgtttgatccctcccgtcacgctggtattgatgttgacctgtttgaggcccaaaggatgggcctccacttgagccgcggggaggaccgagcctactttgagggggacgtcgcccggttgaccttggccttgaggtttggcggggtgggaagtgacgagggtggacgagttttcatcttggtaagtgcggatggctgtccgggttcgggctggctatcgagggtcgttcggacaatgttagacgcggggggggacacggagaggaggctgggtggttgggactcacgcggattgcggccatggttgctttgatcgagtcgttgtaaaaggtgaaaggactagggaaagtaaaggaaagaagagatagtgaagtagatgttccggcgtttgttgtcgcaaagtaaattgatccggataaagcgttgtcgagagtgtggttgcaagtagacgaggactaggggatgagacgaggacaagaaaccgaggacgacctgttgttgtgttggggtcgggtgtttggcgatccgaggcttgtggctagagtctacaagaagctcgtgcgtgaagaggatcttttgtgaactcgtttacctggatgttggtgtgtgtgtgtgagtagtagttgactgtttgttgacgtgaaaaggagcgtgttggatgtcgagatggtggtgttcgttcgaatggcaggttgttgttcgctcccacttccgctcgctcgagtttggattttgtatccagaggggggagagagaggaggcgcgcagtgagtttgtttggattacgtaatcgaaacgatggatgccattccatttctaggtggatataaacctcccgctaacaaccagcccatgacgttacccccctggaatgttactcaacctgggtggaaatagcataaacacacagcgaacagggcgggggcgcactgaccttcgtcctcgaccttgaccgcctgatcctcgccttcctcgatcacgatctcatccccatccttcttgacctcggtctcctcatcgtccgctccttgctgcttcttgacaccttcgggaccgtcctgctcggctttacgcttcaagagcctatcggacaatcgttgaatcctgtccgtgtcgtgttgaccgtaccaagattccgatcgtttgagacgacgggatttggtctgagccttgtttcggagtgatttggccatgtcaagtgaaaggtggtggagagtagctttgggtggttgggagtggtatgaggtggggtggggggatgtgtcggtgtgtcggttgttgatctctacgttgtcgtttgatcgacctctacccttcttgccatagcttcgagggtcggtctcggtcgaaataataatttcaaggttgattccgacacagagcggggggggggaaggtgattacggcatatttaacctaggaaggggggtctgttgaagaatccattcctgtgtttgcaccgcggatacctcctctcagtttctgcctctctcaccttgccccggtcgttggttggcgaaaatcggaaacactcggagcgagcgaatgacggtcgacatgttcaacacacatccatcaagctaatccactcattacatccatcgtcatatcgttcatcacccacaacataccctatagatcactctcatctcgtcacaaccttctgctaggtcagtgatacgacacaccgttcatcgcgacacacccttggctgacgaacgagaccttgctcgcgtaaaccacgatagtgccgccaatcatgttcggaattcaacgtgccatcgctcgatcatctcgacccgccttcagggccggtgccatcgtcagggctcctaccgtctcgggtgagtagaatattgaaaggcgacgatcgacgagcgagcgagccagcggtgtgtttcaaatgggacgctgctcgtcattgtcgtccgtcccaagaaagaacgggagctgatcagtactcgtgctcgtcaaatccctctgccctggacctcgtctcgctcgacgtcgacccttctgaacctcgaatacccaccctggctcccgaccatcctctctcgctatcgctccccttgctacctcagccatccgattcaactcgggcggcgctcacgcccacgagaccgaatcctacgaatccttcaaccaacgctaccagacctttttcaccaacgtcgaagacgtctttgaactccaacgaggtctgaacaactgtttcgcctacgatctcgtcccctcgacgggcgtgatcgagtcggccttgaaggcggcgagaaaggtggacgattatgccacggccgtcaggatcttggagggcgtcaaggaaaaggtagagaacaagggacagtaccaggcttacctcgacgagttgaagccgatcattaccgagttgggtgagtgtcaatgcgttcccaccccggagggcgcggcgagcatggtgggctgatctcgtcctcgtgacctttttgtccctctccctcgatccatacgttttcctacccacatcaccctcgatacattccccgttctgtctcgatccaccggaacaggcgttaccaccaaggaacagctctacaacctataaacccgttgccttcggccgtaccacgcgagtcggatctcggggtattctagaggaacgtgaagaaaatgaataaaagcgaaggagcacggaggtcggtttcgttggtcgacctgaggggggatgtaattgtctgatatggagcgagatgtgatgtgatgtcgggtcggtgcgataccgggaccggtgccggtgccgacgcggtgttgatgcgcttgacgtcgacggatctctgcaagctgatctcggaaaagatactacggacttgcgcgacttgattgtgactgcattcgcagcgagaccatagcgcaacccgtacatcgatgggcgcttctcgacagcaacagattggcctgtttcatagcttagtctacccgtttcactcgcgttgcagctcgtactcgatgccaccttggagaatctcggttgcgctgcagacactttcagttaccgatcgccaagccacttgaaactcgcagcccaatgaacgaatcccttggggtcacgtccgtcagctatgcataaaggttcatccgtctcctatccctattcaacgccttcaaatgggtacactcccttgccctttctccaggccggcgtcaaccccatgaccttgtactgtccgcccatcccatcctccatgatcagcctcttcgcggcgtttgcaatctccagcttgcgttcgcggtccggagcgttcttgagcaacttgtctagacgtggagccaggccaagcgagataagaaagtctcgctgcgtcatgggtccatgcgggtgggctgatgcgaatcgaggagacttggcctaagcgatgaggcggccaaggaacggatgagacgatcggtactcaccgacgccctcgagagactctttcaggtacgcaaagtcgacattggccgtcaagtcggcactgcccgggtcatcgaaaacgtgcacgatctcgtgtcttctaaaggcctgattggagggcagcgcacaggatgttgcataaattcgattcggcccttgtgacatgagtgacaaggccaactcaccctgaacgagttatcaaacgccttttcatcgccgtaatcgacgatcaagccgacaccccccgcgccttgcacatcgctagcgtcggcctggcctcgatcgccccgcttctgatcgaccactttgccctcgatcatttctccaatcatcctcgtgatctcccatccttccttgttgatctcgacacggtcgcccacggccatctcggcgaaccggggtgatgtggccggcaggacctgtgacagtgtcgaactcgtacgcgagagggcgagcgtgagtcccgagttgggtcgacgtgatgaaggttcgtcggcggacgtcgacgattcgacactgcttgtcgcggcatcagtgtcggcgttaaaaatcccgtcgacttgccgttcgactgggctggaatgtgcgactcacgctgatgtagccgtccacgtcggatccacattgacgtagacttctctccaaccttcttcagttttctgttcgggatggggcaaagaccttcaccatcagaaggcacaagaccctttcgagcgacacgcgacctacttgaaagacgttgatgggcaacgcatcaaagaactcgtgcgcgaccaccatcgtgaaaacatccttatctataatattcaacgtggtcgtcagtccggttcgttacatcgactgaccccatcgactcaccgaccggtacttttcctatccactcttcgaactgcaattcgacctcgccgtcaccctgttcgccctgattgacgacgcccctcccgctcgaacgtaatcgatccctgatccgtcgttcttgctgttcccgcaggggtaacgacgtctcgatcagacagatcgattccagccggggtagaggggatgaatgagccggaatagcggcgaacgtctggagcaccaattcaagcggacaatgggagatccgtatgatcagcctggctccgaggtttacttaggacagccgatcgcccggaggtcagacccaccctcaggatatcgtccataagcgtcccccgccctgggcctagttcgaccagcctaatccggggaggtctaccctgagcgatccactcggtcgtcaagaagagggccatcaactatccgaagaggtgcacgggtaagaaacatctcgaggtaagctatacgtgaaacggtatggcatgtaaaatttcaaaggaggtaggtactgacctcgccaaagacttgactgatctcgggggaagtgatgaaatccccctttctaccgaacacgtccttcttgacctcttcaaggacctcggatgaggcgccttgaagcggctccgtcgtcgacgtcgaggtcatgctcgatactggtgttgatgatgacaagcctgagccatctgatgtagaagctagcggcggatgaatcgaatgcgttggagacaatggcgacaagggggatgagttcaaaccactcagtcaacctgaacggaagtgagcctcaacttacccgctgaatcggcttcagatggaatgacaccggattccccagcagtataatccctcgtatagtatccttctgtcgggtgacctagacacaagcgcatgtagtaggccaaagggatagggcctgttgcctgtctcgttgtcaccgatcgtcatccgagtcaatgtcaaagtcgcggcgtgatcacaagtgccggacgaaccccgcactcacccgaatggaatccctgatgagcttggccaagttccctcctgtccttttgatctcatcgggcgagagcttttcccgcgtgaacgtcggggctgaagggggaggggtcggtagacctaagtcttgcagcgtcgggatagacgaaaggggcgatgaggccgtgtttgttgatttgggggtttcatgcgagctgatgttagatggaggtcgaggtggaggtccgggacgagaagagttgaaacggacggtcctggctgtggcctgaacccatgttgtgggtaacgtggaagctctatatcggagtaacatctcgagaaggtctcggattgggtggtgaaatgggcttggacgagtgagtagctagctgtatgtatacctatctaccctgccaccctagtataacctgcctacctgccttacctgtgacctgaactgctcgatcgaatcgacaagttgatacgcgtcgccctctatcggaagtatatttcggggtatctctcggtagcaaattaacatccgacttacttccgttgtcctcatcttacgtcatcaacttgactttcgccggccgtgacacagccttttggacaggattcaagggttccgggatgagtttgcgacttttggacaatacgattccaattgaccgagcggatagtcaatttgataagtcacaccagtcacttcgtgtgtcatgaacatgagcagcaggattcttgtccgtgaggctcgtcgaggagcaccgcgagcgtgtgaagcctgtgtgagataacgtctttgtggtgtgcgttcatgtgaacaagaagcgcaaaggaagagaccccgtgcgggattttggttcccttgttgctccagcaaacatatctatctaaccctagacttgccaaatcatcgtcgagagatcgagagatataggtcctgatcatacttcaaactcgagggccatagcagatcgacctctagtctcaactcggatggttcagccttcccaaagtcgatcctcatccatcacactcaccaagtaaatcagccagccacaaacactacttttaccaccgagacaatagccaccatgtccggtccacccattgccgtctacctcgtcccggtatacattatcatcttctgcgcacttgtcaactacatagcggtaagtttacacgatcatcatcttcccaaccttcacgtcatgtcgtactgactgactatcaatcaacccgttgacgccaaactcggtgatctctcctgacctcagatccgatcatcctccaccctgagatcccgactctcccgatcgaacaagattcgatacctcgtcccttaccccttgatacttatcggattaccccccgttgccggaggtactctcggtggagggacaggtagggagacgacacagcgtgtttcgggaccgacgacctttttctcaacactccgcccgtccacccaaacacgatcaccctcatcatctccatcgcaacaaccacagggaggccaatcgagcctcagtcgatgggtccacaatcggacccgatcgcactcggtcctccccgccggaccgacccacgatgggtcaggaaggacggggtcggatgacccgttgacggatctcatggcgaggcatctaggacggacaggaacccccggtgtgacgccctctgtagggggttcagctgcggccacccgagcggggaggagagggacaacttcgacttcgactccgggcgcagcaacgacgacgaccccgacgacgaggaacactgcaggcagggtcatcacccgcggaggccgccgatggggccggacagggtcacagaggagtacacagaccctccctctttacgaagaacaggccggagaggaggacgtcgtcttgatccggtgagcggaacgatctgcctccagacggtagtagacacgcaaagcggatgttcgggatcgctcatgatggtcgacggtcggggtattgttctttttttcttttcttctagaaaacgagaatccttacgggaagcagggagaggggacgagcaggatatcgtcgaaggtcaaacggacgacgaaggggacgtagaagaggaacaggatgacgagagtttggagcggcaagacgaggcgtctagagaagtgacccctaccgaagacaatgtcgacgtcgatgacgaccaggaccagcgtctccattcgatctccctcgaccgcacgagaacccgagcttccagcgtatctacctcggatattcctgataggggatggggtgaagcgccgagctatgacacggcggttcccccgcccaggttcgatttcgacgtcgaccccgaatctcgacccgtcggtgtgaccccgagcagtctaggagggtttcgagcgttcgtcgggcgattgacgggagggaggacggagcagcatcgacgagggttcagcgcagggtcgacgggtcaggacgacgatcgagcggggttgatgaggatgtcgaccgcaggcacggcaacggtcggtcggagccgaggatggtccaacgcttcctcggtcggcacgaggaacgtctcggacagctcgacaccagggatgatcagtcaggtttcgttgttgtccacaacgaacaacgctcagcctatgaccaggttctctagccgactatcgtcgtttggcgcggccacgcccacgtccgcatcgtcctcggtcatcaacctcggcggaaccatctcggcgcccttgcctgggaccttgattcgatcctcctttgatgcgcctcgggctgggttctcggccaaacaggtcgaattcctcagcagcaccgacagtttaggcaagtacggtgtgcgggtggacgagaatgggaacccgatcgcacctaccagggcgaggggttcgagcgtaggctccacagcgagacccagcgtggacgaggctacgggaactggatggagagcactggccagggaggaacacgctgcaggtggctcggggacggccagtgtacccgcgccactgcacatagtagttcctccaacagtaccgagacccgaactcgagatcgaagtcgtgcccccgactccgattctcaccagttaggagcggatacgacaaactgcgatagatattatagaccgatatgggctcaatagcgcccggtccacgacatatacacgaaaaggacgccgatatgggaaagtctcagggacgtatgaaaatgttacgatagtttctcctaggctaagaagggtgcaagaggcacgctgaaaatcccggattatcttgtaaaagaagcaacgtcactgattattacaggccttattgagagatcgagttcccgtccgtcgctccgacagcctgcacatggagtcctggtcgaatgcgcaaagatcctgcgagagatgggagggaattttgcatgttctgcggaccgtggggtaattcgttggaagaaccgggatgttttcagaaacgaggcaggccccatgtcgccgtccgtattgataccctcgaccatcaccgtttgcaagcagaggaagcttgtcaagaggctatgttcgcagcagctgtgtaagtcgaccatgatcttgttgtacaagctcgacatcgccttgcagcgcctgcagatattcgtgctcggaaccggccttgacatgattgaactgcaaaggcaaccattcgggtttgacccgcaattcttcatctctgtcggcgtcgtcgtcgctatcgccggtgtcctccattccggttcaggcttcatcatcttgatccgttctgtccgtctcatcggccttgcccttgtaggttgtctcaaaatccgcagcgaagacaagattgctggtgtatctcacagtaccggcggaggaggactctatgcgttacagcatcagtgcggtcaaccctaggatacgtttcatctcgttacgagccgggctgcagatcgcctggctgtccactcccgcgacgcttgtctgcatgctgtgcaggcctttatggggatccatcattttggccaagatggacatgttctcccataacccaacacagtagagcagcggcggtgacgtcgtccatcttggcatgttcactccggatgtaccatgggaatacgtcgctccggagggggtgtttctttagttcctcaagaagtcgacgtaagagtagagacaccttcgcccaccaaggtatgaaaaccgggatttctcaaacgccgtcatgacatcgaaaccgaaacgccgttgcaagccatctgcctgcgtaaggtatcccaacggagaccaaccacatgcgatactctcgaattatcaatctcgcaataacaacgacgcattacattgacggggtataaacacgcgcacgaaaacctagaggcaagcgattcttcacgcagtctcctatttccatgccgcatacggctgggatatatctatgcaaagccaccggggcgtcctactttttgggctcttgcatgacctcgataggcctcgaccctgtctgcgtgagatcaggcagaggcgtcgccgcgtgatcgacggacgacatgtcctgttcgtccttgacgaccttggtctctgctcggagatacctgcccggccaaaagtagatgtaggttgtcactcccaagaagagaggtagctggtcgtcccggacgagtagaacggtcggtcaggcggcggtcttcgggagtgatgaccggcagtactcacagtgtccagcaagtagatgtaaatctcgtgtgtggcgaggtacccagtgtatccctcgctcaattcgacggcacggaatacgcttcgaatctaatgtttccaggtcaccagggttgacggtcagtgagcattcagattgcccggtcaacagacctcgaaagaggtagttgaagaacatgtatacgcacgaggaacatggcacaagtgaaaccgagggcccagtagaggggtttccaccaagccatcccccagagctcggggtcgcgcttatacctacggatgggtctttgtgagtcagcatgccgatccccctgggatggacctcgtcgacgtgtcgacaccgccgagcacactcacgccctccatccgaacaaggcccagagacaggtgaagaacgcgaaactggctaattgcaagcagatccccgcgagaaagatcttttggccagcgtccctcaaggtcgggttctgggagattgatagcccacccccggcggcttggatgagaaaggtggccacgtcggacaagacgaagaagagggtgactcggttgggcttgacgggtcggaggtggcgatcgccagagaggtgggacacgatccgaccgaggaggatgtagtcgcctgcatagtccggagggatggggtcagggggtcggccgggtcgtacacgtcaacgactacatgtgactcacctgccaagaaagcgcacggctagcgaaaaaaaaaacacaaccccatcccgggactctcatctcagtctttttcatccagcgactccgacctcgacctcgacctcggcctgggcgactcaccgagaggacgatgaataggtactgaatgatgtacaccgttgtgttatgcgggtccgacctgaacgggatcctcatgcacaatccgatcccatagcctgcggtacggagcgtcgggatcagctcggtcccccgaccaccactatcaatctctgggggagtgtcgtcccgtgtacgacggggagcgcggaggaggtagtcccgtataggttttatggtaggtaagggcagtcatcattcttactcacagtaacacccaatgacgaggcataaaaagtatttcccaccatacctgaaaaactctatcctcccgcacctcatcatatcagtctcgccaaccaaatcgaacacccaggggcagacgagggaagagctgggagggactcacggacggtcaagaggatggccactataaagtagagaacgagcgcggtgatcgcgccccataagaccggaatgtatcggagtgggttgcacctgcaggttccgatcgtacgagggcggggcgtgttagtgcgagatgacgggtggaaagttggtggtggtggtgatactggtggacgagttgaggatgagagagacttaccggtcttcactagggttctcctacagtgatacgtatgaagatccggagtgggatgaacaagaggagaagaaccgaaacgtaaacaacactgacgtcgacctcgatccccctcttcacatggaccggctcgttcgactcacgaaagggtcctcggcgcagaaagatctccgctgagcattcgtcactccggtagccaagaacaagagtccgatgacggagaggtagacgaggttccgggtcatgctcgaagactaatcgagcgtcggacgggagggtatcggcggcctgggaaggcggggtggtggggtggccggagggtatgacgaggagcgtaatccaagcgaggtggtgatgggggcgagtactataaaccgacgcgggtgtgaggacggatgatgatgatgagatcgatgtggccacttatctcggtcacctattggtcctgacctgatgtgatgatctgacctcatggtcgatgttggttgatcgttcgatgaatcttgggaattctcggaattcccgctcggtccggggtagaagccccctcatcacagacattggtccttgacattcctacttgcccttcagttgtcgatgatgcttatcttccccgtcgtcgatgccttgggcattccggatctctacgcaaaaggcacgcttgacagataccgactgaccaggttgttctgtgaacttgagtgagtgagattgtgggccgaaataccaggagacgaactgacttgtacccacccatcacgaagtctccggactccgctcgaacgtgcgacggtctacccggcttttggtaccatcattggagcctggtgtggggtgattcctatggctttggactgggaccgtccttggcaggtacgtcgagctatacctgtcggacctggttgctacccggcaatatcaacttaagaatgtcttctttttttggcaggcataccccttgacattggcattcgggtcaatccttggctttattgcaggcggattcgcaagcttttctgtctcggcagtcgaagaggtcattgtcgcatcgaagaatgcagaagtcacggaaactgtccaagccgagcctactggcaagacacgcaagcaagtccgacgaaaagtcaaatcgacatgaccgctatatgctcggcgtgtcggagtgtggtgtccggtcggggcaacgacacgacgtggaaacacgatctggagatggtctttactttccagccacaggcctagtggaatcggaccatcgaaacgcacttcgcacacgctacaaatcctgctgcccagtgaaaggttctactgcagcctagacttgctcgagcaggagcaacgaggcacaacattgacatctcagaccgtgctgctcgaattcccgccgtcccgaacccatttcgcaaagaccagagaacaaagaaggtgatggggcatttgtaaagagaattgcggatcagctgagctggcacgatcacgatgtatacacaaaagattgcaacagcgctgccacatccagaatacgcttcgaggcaggtctcgatagcatggcccaaggcctttgagattccccatacggtactaatcgttacatctcggtcgaatcgattgcgagcttttgatgagagcctttcactcgtctctgatctctgacctcgacaccgatgcatttccaagccgatgtcagtttgcgacaacaatacgtcaaatgggggggatgcctaaagaaggtggtttgaccctgagaatctgaaaccgaatatactcttgttgttgtacgcgtttgaaggctaaggctgcctctgccgctgctgctcccggactaatccgatctctcgactcctctaactctcaaccaactcgcaactcgagcgttcacatgagcatgtagctgcagctatctgggcaaataataataatacatgggctctaactcgttcaacttctcaaatcacatatatctcgtcgatcatcaggtctgcgatcggtcggcagttcgtctccgcacctgttaggaccccggcgttcctcaaagacgacggaacgacctatagcaaattctcggtctcaatcccctcggtccatatcgtcatggtttacacacctctgcagcttgtccccccggctccggcttcgccctacgatcctgcaccttatccaacggccttatcattcgatccatatgccgatttgctcctcgtcggatcatcttccggtacggtcacgagctattgcagtccggcaacattggaacgacatgcagtctacagcgctcatggcagcaagggtttcggaacctacagcaccatgcgcatgggttttggcacgggagaagtgacacaactcaaggttgtggataaggagatctggagtctgacggaaggcggactggcaggagctagacggggtggtctggtcagatggacagtcaggtatgtcattgccattctgcttggacggtcgatctcgctgaaccgtactaaaacatactgcagcgatccactctttgccctgcgcacttttgattctaatcctctcaattcccacgagatcgtggctggtggtacaggggcacgtctcacaatcgtcaacacctctcaaggaaaggtagcaaaaaatgtgagcacggtcatatcgacactatgcaatcgcgattcatctcacgcagaccggtcttcgttctcgaccacaggtagatcaacctcattctctctcccatatcttcaccttgcctagatcaattctcacggcatctccatcaggactcttgcaaatcctagacccacgccagaactatcgccaggtgtccgtgctggccgcaccaagctctcagacaggcggactgactggtgtggacgtgcaaggagatctagtagccgcttggggatggaacgtcctgtaagcagcccggaccctgctggcaagacgactactacgatcactcaccggttcgacatgtgcaacgacatgtcaaatcacgcctaggcaaggtcaacccactccttcatcaacggtctccctgtacgatctcaggacatcgcgcatgcttccgcctgtgcatttcgaccaaggcgcatcttgggctactctcgaccctgtcaagagcaccagcattgtaatcgcgagctcatcgggtttcatcgacgtcctggacacgaacgaggacgagaatgcacgagtggattcggatgagaatagtgtacaggtgagtcgcatcgcgaagtatctggccggcttcaaaacaagtcagattaactcgaatctgggctcgattactgtcaatagctagaaatcgatcagttcattaccgctttggctatctcaccgcgaggcgactatcttgcggtcggtgactcgcttggccaggtacaactcctcacatcacacgacatatcagccgagacggacctgatcggcgtcgatggcatgctgaacctaccgcccttgaacggtcacgaaaatggcacgagtgtggaatggccggacttgccgatggcctcaccggacgttgagtggactggtcgaacgtcagagcctttttctactggagttcagcgtcgacggaccaaggctgacctacatattgctgcttcagcccgctcaatgtgatcggactgcccttctacgatagccctctgctatcaaatttcgcccccaccgattacgctaccgcttcttcgccattattcaatccgtcaaagccgatcccttccagtgtattggccaacatgcggatcatcgatggcgttggctacgctccactcccgagagatatgaagggcaagcgcaacgtagtttgtgcggatagcagcgcgaacttaatgtccaccgattcgagtgtccatggtgctgttggacgaggcaaacttgcgcagaggaaagagagcggaccgaagttccgaagcgaaagacacaggcggggaggagcagaggcgctagacgaggaggtaaatccacaggcgctcgttccccgccacttgattgtgtgcattgctgacctagattctgtcaggctgtgggaccggcaggtcaaccgaatggcccgacgatgcctaaacactaccgcaaagtggagatcaagtattccaagttcggagtcgaagtgagtcgtcacatgtgcctagcaggattcggagagatgttgctgatgcacctcatcaggatttcgattttgagtaaggatgttacatcaaggaatgtgatcagacagctgacttcgctcgaacgctcaggttctacaacaagacccagcacagcggtctcgagacgcacatctccaactcgtataccaatagtctgcttcaagcataccattacactctacccttcagggcgtgcgccaaggctcatctcgcggtagactgtccaaaagaacactgcatgctctgcgagtcaggattcctctttcgaatgctagaggacgccaagggaatcaactgccaggccagcaatttctcgagagcatttagcgcaactccgcaaggtaagaagcccgctgaattcctggggttcgaggctaatttaccttggtacagcgcatgcgctggggctcttcgtgtccgagaacgaggcgaagaagaaagacttcgctgctctgatccagaagttcaatcggtggtttacgaatagcgttgctgtcgaagatgtactgccggtcggccggaaagcggatgtcgcacgagcggcccagcctatctccccagatactgcaaactcactggtcagccaagttttggctctgcggggtcagacggataacgcatgctcgctttgcggtcaatcggtcttaaaaggctttgcagcacacgtcgtcgatctgctgtatcctcgcaaggtaagtcaggccctttgagtcaggttacttctcgtctgacctgtcgtgcagtctggcggtctgtcggccagctcattggaaggctctttcgccagtatccttcagcattccctcactcgtgaaacttccaccaaagcaaattgtgcggcgtgcaataggttgactacattcaccagtcgtcgccgctacggaaatcaagctcgcgaaaaagatacacggacgataccccccgttctgtcgataaacgcgtcaataatctccgacgaccacctcgaggtctggagagacacccctctatcacgtagcaaacatggccggaagaggttcttaccggacgccgtgcgcatacgtcttggggaagagggcgacgtccacgtttgcgacgacatcgatggcagtctgacccaggcggatgacatccgttacatcgttagggtaggtgaatgagagatgttccgctcggtgagtagttgcctcatcgccattgcgttgtaggcatttgtggcgtctatacaagaacatgaatcagatgaggcccatctcgtcgccttcgttagaggtacgtagaggatcttcatcatcgctgtccttgatatgttactgaatgcgcctaagacatcgcagtacctaacgacgaaacgtcaggggcggtgattaatcagccaaaatggctactgttcaacgacttcctggtcaaggaagtcagcgctgatgaggcgctgagttgtgccccggcttggaaggtgagtctttgccgtgcttccccaaatacgagtaaccaagctgaaacacatcctcgccggcagagccccgctcttatcgtcttggagcgcgctgacgctgaacaggtcatgaaccttgagaatctgcccaaacagatcgatcccacgattctagttcgagactcacttatctccgggtaagagcgaaagtaccttgaggatatacacatttggctaatgacgtcgagactacagccgccggaatcgccatcaaatcaagcacacctgccttggcctgaatgagatacctagaccaggcactctcgtagctatcgatgcagagttcattgcgctacaactggcaagtcgcattccattatctctagggtcaatttcattgaatgggcggctcaattgcaacgtatataggaggagctcgaaatccgttccgatggtacgaagaacgtgttgcgacctacaaaaatgtcgcttgctcgcgtttccgtcttgcgaggggacggagcgcgagagagcctgccattcatcgatgattacattcacacaagcgaaccagtcgtagactacttgaccgagttttccggcatcaaaggttcgagatctgcgttgactgacagtaatttaccagtccgttaacggcggacttctcttctcgcacatagagggagacctgcatccttccacctctactcacaccctggtcccgctcaaggtcgcctacaagaaattacgcacatgtgagggcaagatgcggactttgacacgaaaagcagggggctaacgcaagctctggctgatgagcagtggtggatcttggttgtgtctttgttggtcatggtttacccaaagatttccgaacaatcagtaagtctaccttgacagtataatgccaacagccatttcactctaagaactttcgacagacatcttcgttcctccggcccaggtgatcgataccgtcgccattttctacgatccctcgcgccatcgtcggctctctttgcgctttctgtcgtggttcttgctcaagcaagacatacagactgccgaacatgactcgatcgaagacgctcggtgcgctttgcagctctacaaaaggtaccagacattcgtgcaggaaaatcgattcgaggacgtcctggaagatatttacgaagcgggccaaagacttgtgggtatttcctattgggccgcaaaatttcgaatctaggattgaatccaaatttgcatcggaatctaggggtttaagccccctcaaaacaacgaaggggcacccagtgccggtggcactgtcatacagctaccatcgacccccgaaaaaccacctcctcgtagaaccggaagggcgcaactagatggacctcgcataggctcccctatgcgaaatcagcgatgaagtcgccagcggttgtataatatcaatgatgaatcttgcagatacatcacctggcagtacaaatacctggactttcatgttttatgcgcttgcattgttcgaccctcgccttaaacgcaggtcgatcacgccaaggcgcgactagttcttctcgatgccttgcttgagcacctcgacttgcctctcgataccgctccggctcggtccacccaaggtgttccttttctcgacgctgttctcaaagttgaagacactctcgattacgtccggctcgaacttgtcgctcagttccttgaactgctcgtaagtgatgtcggacaactggatcttgttcttctccgccaacgcaacagcgcggccggagatgtggtgagtctccctgaaaggtacctagtgtcgcgcaagaacgcttagcaaatcagagtaccggtccagacttggcaaaacattcttcatctgcggactcacccctttgcgaacaagatagtccgcaaggtcggttgccaacatgtcggctgtgagcgcctctcgcatcttttcctcgttgacctttatgtcaagaaacgccgcgaggcttagtatgtggcactgtcagggcagtgcgtgagagcccatacgcacggtcatagtcgcgacgacgccctcggcaatccggatgctagcgctgacggtgtcgacgcagtcgaacaagggctccttgtcttcctggaaatccttattgtatgtcgatggcgttcccttcattgtcatcatgaagccagccatctggaagaaacgcctcagtcaatgcttttaggatcggtctgagcgtacgcaagctgtgctcacctgaccgaagacacgaccagatttgccgcgcaatagctcgagggaatcctgcgcagccggatcggtggtcagcagattgccaattcccaagctatgtccacgatgtggctcacgggattcttcttctgaggcatgatggatgatccggtactggaactagagttcagttgggtatggataaccctggaaaagacggaacccacctgtacgcgtcgctcagctgaacaaagccgaattcggcagtcgaataaatgatgaggtcctctgccatcttgctcatgtggaccatgagtagactagcccattgcaaaaactccatgacaaagtctcggtcggggacgatgtgcatcgagttctcgccgatggtctggaagcctagctcggcgcgcaagaattctcggtcaagtccatatgggtttcctgccaatgcagccccaccgagcggcagaacggagatgcgggggatgatcccgttgaggcgatccaggtctgtcaagaatccatgagcatacgaaagcagcagatgcgaccatcgaacaggctgagctcgctgttgcgccagaaggggttctctgtcagtcacacggtcgacccaacttgtcgcaatagacagcaggactcgtacctgaacgtgcgtgtatccaggcatcaagatgtcaacttccttctcggcccggttagccattacagcgataagatccttcaagtactgcttgatggtatcggcctcgtccatctgttgaggtgcgtcgagattgattgacccaatcagacgagccgatcgataagcacttgtgacccgaaaacgcgacttgccaaccagatcctcatgtcagttgcgacttgatcgttcctgcttcgcccggtgtggagcttgccgccgatatctttgccaatgatctcggatagtcgacgttcattggcagtgtggatgtcctcgtcgtcggctttgatgtcgaactagacgaacagaacgagcgtttagggggggaacgacgtgacctttttcgaacaggcgacacaccttgccttctttccattcctgttcgacgatccgcagtcccctctcgatctctgcttgctcggatccagatacgattccagccttttgcaaggctttggagaatgcaatagagcccttgacgtccgccgcgtacatcctctgatcataggccaacgactgattgtactgatgcatcctggttgtcaagcgattagcttagatgatcactcccatgaattcgtacgcggactcacaaagggtcggtcgcacctgtgaaacggccactgtgatgaaacccggtcgtcagtgtagcaaattgcagtgaggacgcaaatccaactcacccccacagctttcgcttcgtaaagtcgtcctgagaggcgctcatcgctgattttcaaaggcgtagagatgtataatcgtgctaggactggagagccgagttggatatggaattgagaacgttgttgcacagtgatgagttataagtaacacagttggcagaagtctgatagcgagatagcgacaagtccgagtccgagtcagagtcctggtgcatctcgcccgcgtcacccgaacagaccagaccacccgagacctcgacccgtatcgcgccagagccggacgtggttttctcttttctcaggacgacgtaagggatgatgactcgtctctacagcgtacgttgttttacaggttacagttctacaggacagccgtctccgcgctttcaggttacaagtttacaaagcaggcatatccgcaaaagcgctcaaattctcaagaacttttttaagaccacctcgggcatctttcgccgaagcttccctgcgcgaagcaaactcggccttgcgcaaagccaactcagcctgctgaccccatctctcgacctcggcctctgcttcttgcagagcgagagtgatggacgtcatgagcgccgcttcagtggaagttcgagcgatctccaagtccgtcaagcccggagcgcgtggaagcaggcccgaggtcgaaagcgcggctgtcacagcgtccccaacagcggccgatctctttgtcggggtcgctcctgctcctgctcctgagcttgggactccgacgtcaccgttcgctttctcttgtccgtccacgaggaggcagagtcgaccaaggcggagggagccgagccggaggcgaccgacgacgacgatgggcgaggagaggcgggaggggcggccaagacgggggcgacggacgacgacgacgacgacgacgacggaacagccaaagcgggggggccgagcgagccggaggcgaccgacgacgacgatgggccagccacggtaggggaagcgagcgagccgagggcgaccgacgacgatgggctgttgaccgacgagggaggcgtcgagaacagaggggtcgcttctagcagggctcggagaggggcagtggtgcttggcggagtgaacctcggagccgggatccgcactgaacacaaccaggctgattgctggacgaactcatcgaccgcatccatctcggctagaggaaccatcctcacttccagagccgccgggactcgtcgagagacgcctctcagcagaaccctgccgactccgtcgagggcctgtcttagctgcattggctgaaacggcgggagatgatatttgacgatgatcatggaacccctctgctgcctctgctgtttttggattttcactggcggaaagagatcggagctctgcgcgatgactctgcagagatcttgaagctggccggcctgaacctgcccgggtccgagcttgtattcgacttgtatcttgccaatggtcccccggttacgacgtacgggtttgactcggagacgaacgatacactcgcgcatactgaacacacgagagacggataagcacagtatcggatagaaggaagggaaaggacgtacgcaaggaggtgcatagcaccctcccagtctcccctggcgagaagcgcgatgttgtcgtctcgcccttgttgatctcggtacttgactaccgcaagcatttccagaggaacgcttagctcccgcatgatgtcgccttggactcgttgcgacactgttcgagcaatcgcgacctgctgtgccgtcaattgccccgatgccgagaccgagaagtcctttagctccggtataatgccccatatcaagagctcagcgggttggttcctttctatcgaggggcgagtgagacgggagtccatggtgagaacgtgttgaaggtgtgttttgacgatatgacgatcgaaagtggtggaatgtgatacgatatgatgtggacatagcttgactctatatagtcacgtagtcgctggcgcaagttcttgcttctccgtcgctatcactgctgctgtcgccgtgttgtcgacgacatccttgatggaatcgcgggcgtgagaaagctaaatcctctgcttctccccctcccctccccctttccccccattggcttgttcgctccacaagccacaaggatcgtcgccatcgtcgtcgttgtcgtcgtttcggggggttctgggaagacttgtcctcctgatccgcctcggtagttccatccggtcgtttggtggatcgcttgcccctccaagcccccaaaggcacccaacacgttcgcatttcggatcacgtgatgactcgtttgctcctcgttgatcgtcaacggttcagccaaggaagagaaatacgcccccgggggggggggggaacgtctcagatgatgaggtgctaaagtgaatgaggccaacctcgtcgttgtgttcagtgcgtgtcgtgcagtacattcgtaggagtgtagcaatccttgatgtggattgtggtttgagatcgagagcgagcttgtgtttcggtttaggggttagggttctggatgagacacgagattgtgacggcgattcggttcaagcgcgcgagtcatacaaagttcaagtccgagcttccagctagagcacacatattgttgggaattcaggtagatggaagcaccgtccgcctgatcaaactcgatatcgcattcggatcctagctttaacagctcaatactgatagcttaggcatcacccatatctacccctcctgaagcatacgcaaagatggtggacgtcaccgagctcaacatcgggatcatcgggatgggagaagcaagttcgaccgaccggttctcacctagtccacacaacaagatcgcaggctgacctttatgtacgtcgccatacataacagatgggaaagatgtacgcccggaggttcgctgccggggggttgaagaggtgagccgattgtcgactccacacggcgtcgtctcgacagcccagctgatgactcggttcgagcagaatctacgtctgtgatcgaccagaacggttcgatcaggtcaaggaagagatgtccagcaagtcatctctcgacggaaatctgtcctcagaacctctagctgaccgtctggttttgcagatgaacctgctatcacggtcatgaaggacggacatcacgtctcccggatctcggactttatcatctactcggtcgaagccgaatacatctcggccgtcgtccaagaatacggtccgtgtgagtagccgtctcgctcatctgccgtgcctcggggatcaactgagctgattctcgagctccacatcacagccaccaagatgaactcgatcgtatctggtcagacctcggtcaaagctcccgagaaggaagctttcgaaaagtacctaccagcggacgtccatatcgtctcgattcactctttacacggacctaccgtaaccaccgagggtcaaccgcttgtcagtctcagccatgatctccgagaaacacggcacctgatggtacgtttgcaactctcaccaactaggtcattatcaagcaccgagcaaccgacgtcgaggtcgacacggtagtcgagatcttcaagtcgttcaagagcaactatgtgcatctgagctacgaggagcacgatcttgtcactgccaatacacaggccgtgacgcatgccgcgttcttgaggtacgtcccggatgtgccgacgtaggataagcgagctcacaagtccgatgactacccgacattatagcatgggcacagcttggaaggacactgcagattatccttgggagacgacgcgatacgtgggtgggatcgagattgtcaagatcaacatcaccctccgaatctacagcaacaaatggcacgtctacgcgggcctcgccatactcaacccgtctgctcgggaacagattgggacctatgcggacagttcgacccagatcttcaagctgatgatcgaagagaagaagcaagagctgagggagagaatgtttgcggctcgggaaggcgtgttcggttggtcgagagaagaaggtcgcgagcagaacggtatagccaccgggagctcgcatgagcaggccgtccctgcggatggcaagaaccattcatcctcgaccaagtcaaggacggcacggaaacctatcctgctttccgaccggattctcgaccagttctctctcggatccaagccggaaccgggtgaggggacgagacccaactcgcatctcagcttgatggccatggtggactgttggcaccggttaggtatcaagccgtacgaccacttggacgtcgccggtacaccagtctttatgctctggatcggtgagtcgtcgctctcctgcttccgggcgtgcgcagtcggctgaccacactgtcctctccaggggttgccgaatacctgttccgatctcccgagcgactcgaagcggcgatcgaggccgccattcacgacaagactcatcggtcagatgataccgaattctgcatcgccgcacgaggctggagtcaatgcgtgtcttttggcagctttgatctctaccgagaccgattcgagcagacggcccgtacgtacaagcgattcaccttgattgagattcactcgctgactcgctcatacgtcattatcaggcttttttgcaccacggttcgaggaggcggccaaagtaggcggcaagatgatcaagaccatccaggaggagagcaagaagactaccacgtgatgtgattctgagacattgcacattgtagaataccacctgcatcagatccttccagcagcatagtatcattcatcatatcgcattctatcaagcgcggcttcggctcgcaataccgtgattcgagtctcgcgcatgattctccactcgcgacgggtcttgaagtctgcgatgatgggcaggatttgagctgcgagatactcatccgaaggccgtagatggcatggtgccggtggtgactgagagaaaagtcaagatctgggcacaacttttgtcacggaccgaactgacctctatgttgtacaacaccatatcccaaaatacggctaaaccccagcccgcgtccatttccagaaccttctggacctcatcgatccactcgacctcccagctgaagatgtcttcctgatcccgtccatcgacatgtcggaaggctggctcgctgccgagtcgctgcttgagcaaaggcaagatgtccacgatactttcctccacacggcataatgaagccaagagattgttgtatatattccggattatacgggaattggcataattgtgattgatcgatatacactacgattgtcgactttcccggtcagcaaagctataccagggtttgcgtagttttgacgaggactcacaaaatcgagattctcgacctgatggtaccagcctgaaggcacgtggatggtttctccaggctatgtcaagaaagttccagctctcaccggcagtagaggacctagagacaagacactcactccctgctctaagatcaccacgccttcgagcgcattcccgtcgctcaactctcgcagatcgaacaacatctccggttctccggggccctgttgcccggtgtgcttctgaaatcgatgccgtatatctggcggtatgagccaccatcgcttcctccctatcacgttgctactccagctatagctcccgtatacatcccgatggagcggcgtaaaggtgccctttggacccatgtacgtgaacctgtagtcgttacgcggcctgagtgacagggcgtgatgggtcatccagtcgtctgatggcagcagagggaaagttcagctgcgtttcgtgatgacggcctgaactcgttcgttgttattcgccttggaatagtttgggagttgtataaaattccgcctgactcccgccgtcctcctcgagctggagagccagatgccagtctttcacgtagagcccatcgccggtaggatcctgctcggtccagaggtcgatcacgttcttgagcggtctctccgatcgctcaaactcgttgtattgccttttccgagtatctgcgacctgcacgatgtgatgcccatatcggtcccgcaggtgatcgagattcggtcgccgggaagaggtcgaagaggtgtcatctggaagccgccagtcgcgaagagccggccagccccggatgaggtctgggccatatatagtgggttcgtcaggtggtgtaatttgcgcagacatcatcgagaatagccgacagcaagtggtgaagatgcaggacgaatgtttgggcgaaattgtgaccgaaaactcgagcctgggagttttaggtcgctatttcggtcatgcccgatgtctactagtatcgtcgaaattcggaccaattcgtcgatcaactgttaatagcagcagcgttaagcattctcgagcagttcgagttggttataggatcatggcaagttgacgatcttgcatgataccaggcccgcatcgtcaacagggggaaccctgaagacatccgtcagatttagccagatcctcaccgaggggctctccaccatatatacgcaacgaggtctaggactggtctctgaagaagaaatatatcaccgagaagaacctaatgggtgcagatgaccacctctttcaggaagtcgatgagaggtcattaagggtgggatgaagccaggctcttggtcagagagggcgacatggtagcccaacgggacgacggcaatggcatagacgcctaggttacgacgaggcgcccagtgagtcgggtggccagcgatacctggtctgacaaggactgatcttggtacccttgcgatccaggtcaacccgtaccctctgttctccactaattggcacctttgctcacgcaacaagacctagtgaacaaagttgccgaggtgcaccccgaaatcgactacaaggtgactgatgtccttacagacctggagtctgcacaaaaaggcgcaagctctgcacggcacttcctccggccttcctggcgagggtctccttcacctcgatgccaacgtgtctggggaagccctccccgatgctcccgcctgccacaatctctcgtagggttgccgtcgagatggcaaacaaaggtcctcgaacatggatatccctgtccaaggcatggccggcggtccggaaagcgaattaggtcgcagcgcaacaccgtcgtcacgagcgagcccgtcggcactactgccatcatcgctgattcaacgtcgaccgatcggccgaccgcgactaactcgcctttgactgatgagggtatgccagcgggtgagacctcacgacctgatcgatgtatgtgcagaccatagatggtcttcatatactgtacagacggtagattgtcggaacggagcagcaaagccatagatttggctgcgacaatctggcgcgcgcttgacacatacaggaagaacagacacaatgattcgggttttcaaggcctctcgatcgccccagcctcaatcaaagccttgcgttcagtccccatctgatggttgaggattttctcactccattcaccggggatctgtttagcccagatctggtaacctgtgctaagcatctctacctcgactttgtctccgtccggctcgttctcctcgacttcctttttgtacgccttcaaatcctcccatcttaccggctcgatgaaggaacggcccagtaggatgtcggagaggacgatattgaatctgagtccgtccgaatcccagttctccctgacccatacctcgggcgacttttcctgagcgagtgatcagtctcgaagcgatcagtctcggatctccgggcagctcaaaatcgacgactcacctgaggattcgggacgagtcattcgaaggcgggatggatcagtctcgcagatccggtcagggcaagatcgacaactcacctgcatcgggacaaggtattcgaaatccacatggcacctgcagacagccatctgtctcagctacgaatcgtctaggttacgaatcaacgcgtctcacctgacccgtgcgttctcgtccgagactaggtcccataatctgggaaggaactttgaggtgatcctgaagatcaatccccaacccgatacctgtggttgtgtacgattatacgagttgaatatgtttcatcatggtagagttgtttgttttacgattgcagagtcgactcagcgctcaatttgtttaacgatcgtaaagccaagttgggcctcacctccagatacttgtaactccccgcacggctgctccttccggcgatagtgagactctgtgttgcctccatcgacaccaagccttgatacctgatcaggaagcatcaataggggaaatcttgaatgagctcgacgggtcatctgtcttcacttacctcgcaatggctttcacccccgcgttcgccgcttctccgcgtctagtcttcgcctcactcgacaagctggtcgcgtcgatgtccccaatcaagagcggagggtagaaggtggggaagcgtgaaggtttcaccttgacgacccctctcgaacctgaaatcgtctcccagccgaccgcgtcgttcatggcgagatcgtgtaaacgtacccctcccgtagcttctagagtctatatcgtacgggatcagctgcttagttgccatatcagagtcgatctacctacctgcttctgacgtgtccacctgccactgccgttcccctttccgaggccaagggcgagtatcatcattgcttctcctacagatcgcaggactgggtctccgccgtctctcatcatgatgccgactctgccgtccttgaccgagcactctcggtaaaatctctgtcccgacgacgcttggttccaatggcgatcccagcgttccttgatgttcttggattggcctccataggttcgttctccatcgatccacaagtacaatccgccataggtatgatgttggtccccttgaacgaacccatgcttagcgacccagtccctataagcgttagagtcgaatggcctggactggcattcaagtagcacctgccaccacgcagcttgttcgctgtccaataaatcgaaaatcctgcgggccaagtcggtcgctgaaccgcgcagaagctgacgaagtttggtgtgtataaggatatttttaagggaggtgtacgcttgtatcctcttgatggccctggtcagagcagcgagtgtcgcgtcgctcatgtcgtcgggttcgctcgtcatgtcgttgggttcgccgtcgtcaacgtcggcaatgtcgtctaaatactggtatccgtgcgcgtggtgcgcttcatccgcgtcgtccgcttcgtcgggttcataatcctcgatcatgtgctcctcgaccttgttaccctccttaggaaagatcagcaagcccgtactgctgctctttcggctgaccagggggtaccgaaatgtggttgacgagggtcgcatatagtaaggaccgtatgtagggggatcaggcaagtctgatcggtcgactgcttgacctttctcttcaaggcaggcgactattgctgcaattgcctgtctcatcggttcagccagtaaaactttgtcaaagggttcgaagcgatcgctcacaccggctttagtcaggtgacttggcttctcgatatagcaattcacttccggtcgattgaatagccagggcacaaagctcagctaggatggacgagacgagtttcagctgcaaacactcaggccacttctagtggactgaccagtgcattctccaccgattgatttgacttcctcacgaaacgactgagatactccgctttctcctctttggtcagggtaagtagcacgctcaatacaatgggcctatccgcattctttaggtcgactgattttgccttcctgtacggttcagcgttcaaggcagccgtcttgactgtcgaagtaaggtcctttggcatcgttgtggacggcgagtgtgatgggctagtttgcggatctgatcgtctatagccatgtcgtgtgatgccaggaaggatcagtatcccttttgcaaagccgtatgagcatacggaaagacatacgcttagaccgagctcctccagttcttggcggtcggcgtttcacaacccgtgcaaacctctgctaacaagctgtcatcaacgacagacgggaagatggggacttggctgtgtaagcagcaccagccgggtgtcgagactgttgatcgagccggacgagcagaggatgggagtcaggaaaggaaatcgattttgatcagtctctcgtgatgtcctccgtacggccatcagactcacggaatgccacaagatgatctgaggccgttgaggttgtccgaggcgatacaatggtcgcagtaacagaggtagatagcggtacatgaagtgatgagggtagacggcggtacacgaagtaacgagggtagtagcgatacatttcaaatgaatcgatcaatgtactgaagctgattcactggtctagctcgtctctcccatcactcgacccagatcccggctcgacagaaagtcagtcctggtcgctgatcgcaacagtcgatcgccggctgcaaaaaaactagcgccccgttcgattcgcgtttcagagtgagacatctcgtcatcgtcaggatcacatcagtgaatgaatgggctgtgacggaattttcttcgtggtgatctactagaactgtgctccagcatggaataccggaggacatgatgtgacgcgctgaacgatacatttcttgccccttcgctgaagcgagctgcgcgcggataacagcgagagtccgtgtttgcactggagctctagcgcaacatgcgttgggtaccgtccgtctcatttccgacacgccttgccccgcctccttctagccatcgctggggctacatctttaagggccgccgctctcgctcgagatctgttcccaattcctctgcctctgaagcccgcggccggctgggtcgtcccttcgtttgaatccaatcgacggcgtcttgtttgctgaagtacgacggcagaccgctcacccgtgataggcataatctcgtgcatgatcgtggcgaatcggaacgtcatcatgtcgcccacactctattgaatacgataagccctccccatgaggtgtagcataaggtccccgtctgtacgccatgagagaagagattatcagtgatgggcaacgtgtggcttctaccgtctcgcttccgacttgcccttgtattggccccaattcatcacgacgaaaaactctcgtcggtcgtcttgcggatgtatatgagcattgactcgtagatcgtacaagactgtcatgccaaggaagctggtcggcccgaatatatgaaatgctggctcccattctcgtaccgtccggatgatcgcctgattgcgttctggcatagcctcgccgtcggcctgtatgaatatgttatcagctgatggtggtgatgagcaaaccggcagaacaacaattgagaactcacgcacagcagtcaattggttgcttgtcgctggaatatctccaatacgtttggaggaaatgggttacggcttggaagcggtagcaacctgaacatatatctgcggaaatgcagggacctacgcacaacaaaaaccagcagcgatcaatcgcctgtcaacaaaggcaacgaccaaccagtcctccgaccttggggaatccagtagcagaaatgacagaaagactccacaccgcgatttttcgtactagtctatcgtctttccccgaccgcgatgtcgatagtcggccttgtgaggtgctgggagccatctaattaaggtcaatgcaccctggtcgaccagatggacaccaacactggaaagcggacacatcattctaaagacggatccgaaacgcgcacgtccgactcgcctcctccctcttgtgtggccaagtttcacgtaggtcatcgaaagcatcagagatagcgtggatgtccgcgacctcttccgaattcttgtgacagagggcgtgcccgtccgaggcggtgacaaggacatcacgtggaaatccatgttttgatatatttttgtaatactcaaaaaaaacactcgctggcctcttggtgtaatggcaacactagagtctcataatctctcactccgagttcgattctcggagaggccaatcctttttgcttgtttcacggtttttttttttgctaccgggtggggggacactatagcgcgattatccatcttcgcgttgcgacaagatcagttgcgatggctacggacttgattgcaaggtgcacagactaccaccaatgtcacgggaatgaagtaagatacgtccaacccgctgttctgttcttcgaattgatggggtgattcgcagtgccgacgcgcatgcctgtcccgacgataaacgcgtcgacttggatgacgcagatacgtgctcttctcctctcctcattctggaggtggctctaaagtcatagcgaatcggtctgcgctaatcttgtgtaccagtgtttgcggtgggaatgattctggaaaccaacgtaatgctgcgccgtgctcgactgttccaaacgagatgcagggtcgcagaccaatggcgcgaaatggctttctccgaccgacgagcaagggcgccgatgttgtccaacgcatgtgatgtctgagagattgcctggtggctttgttcctcagacgtggtcagcttccgaggattcaagggtgaaatgtggacgataccgatgtcagacgggcgaaggttattcgtcaagaaagacgcccggagactgacccagccggcttgaagagagctcagagccgagttcatggacgacgagacaagaagaatgtggctcaacaggcatgaagagagctggcggatgaagccaatacgggctaaccgatgtctgacattcccgccagacgcagagatcccagcgaccggcgttcctttcgttgtaccgcaccttatgctgatcttctcacatatgccttgccctttgattcgaatccatatttttgagtgcgagcagaggttttgcttgcatcctatccgctttacaatactcctcatccctttcaaacccgatcgagttgatcgctttacgtcacccgctcccgatctatcgcggcatcacccacaacgatatgatcttagaccttgtcttttctctactgcgtctagcccataaagtcttcctcccccccccccccccccccccccgccccacccccacccgatccgaggatcttgcaagaacgcaacgaagagcgcgaacggatcgcacgtgtcaaaacgcccgtacagcaacccgatggcacgtggagggtccggatgtgggattgggcgaacaagggggagaagaaggatgagaatggggagacggtctggagggaagctgcggatccggccatgatcgcacccgatctcgtggaaaaggctcccgtggacaagtggaagaacaagaacaagaagggcaagtatgggaaaaagggtggtggtggtggtggcggaggcaagaaatacgggggtggcaaatcgtccggacccgcaggcgagggcagggtcaatgtcaagatgagggaacaggccttgatgtaccgtcaacaaaacgatcgacatgatctaccttcggaaacgtctagcgggtcggaagagagcgaggaagagcaggagaacgggaacgatgatgagccactgggatcgagttcccagccagcagatgacggggaagccggggcctcggggaagggcaagaagggcagcaagaagaaagctgccgccctgaatgctaatgccggtattggcacgaccgaggaggaactgccaaaaccacgcaaggtcaaggggaagacgtatcgacggaccatggccatcgccaacgccagaaacagggaaaagaaccctttcgtcctcgaaggccattttgggaccgaacccatgcttcctgtgccgcctaccccggccgtccccccacctggtaccgatcccgatgcagcacccgtgccggcggtacccgagcggcagaaactgaggtacgtctcgaacgccatctcggacgtcaaggatcggtacgtcgccttgcttttcaacgggagcgatgtcggtctccgttgggtaggcagagagtacacctttggagtgaggacagaggagaagcgagaagaaagggaaggacaggaaggtggtggaagaaggtggggaccaagaggtcctaggcgaggacaagccgcggcgaatggggttcccaacccggcagatgcggcggcggcagcagcggcgatcgcggctggaggaaacaccgacgacgtcgatatggaactctatcgacccggttcggcctcgtccggggcagacgtcaaacctcatcttcaggacacgggcgacaatccggacgctttcccccggatgctggcgggccgaggcggacaggatatcaaacccaaaatcgaggtcaagtcggatcccgatcgcggccgaggcaggggcaggggcagagataccaaacccttggcagcgcagacgtcattgatggacaagctgaacagatatgaaggctcggcgtataacttcgccaaggcgggcagtggaagagacatcgatgagtacgctgccgacgagatctataggcaaaggcagagggcgagaaggggggtgcagaaatgggatgatgacgatcttgagacgagagggaggcgcggtggcgtcggccgaggggtgagtcgacgccgcattcagcttgatagcgggacgagcgctaatgtgttctctgatcctcccgatactatgcaggacgtggagcgtggtgcaggcgaagactgggacgttgagaatacgggcgaacaagacgacgaagaggaagatcacatcaatgccgaagacgaggagatagccagggagcgcgacgtgagtttaatgctcgcaaagcactttcttcgccatatactgactttacctgcggccactcgaccaggcccggatcaaggaggagcacgacctcgccaatgccaatgtcggacttttgcagcgtgacgaggccgacgattcggactcggacgatatcttcggagaacgcgccgaggtaaagaaaaagctcagaaagagggagaggcgattgaagcgcaagttggccggagagaacagcgacgagagtatgaccgagagtgaagaagagagcgagagtagcagtgacgaaagtgatgccacggcggtgagtcgccacgatagtcctgaaatcgtgcagagttggacctggctgaaccggcgggatttcagccgactgaggaagaggacgtcaagccggatatcaacgctctcaaggcagctaccgcctcccctaccaaggacaagagcaagcagagatcaatctcgccctcgctcagaaaggctagctcgccctcggcccctgtcaagcgggaagcaagtcccgctggcagctccggacgcgccctctcgatcgatcgcggtgctggacacgcgatggccgctaggcgagcactcagccccgcaggaagcaggtcgtccgtggagcctggttcggcttcccgcgggaagaagagaaaaggtcctcccgctcagaacactgctcctcccgagtcgggcggtggaagacctctgacgccgctcagcaagaaggcgcgcgccaacacggaaggcccctcgcctccatctagcgggacgtcgacacctgtcggaattgatttcgccatgcaaacgatcgacgctcctatcgtcagcggtacaggtggaccagcttccgcagctaccggtcacactcccgtactagccaagaagcataaagcgcggggcaagaagagtaagaatggagcagaagggtcgtccacgcccgatacgcctcgcagctcgagcgtcaatgcaggtcgtcatggaagtcctgcgccttcttcttcacgacagggaagcccggctccgagcagtagcagccggcgccctcagagcaaagcacccaaggaagcacccctgtccccccacgaaattgaggcggaaaaggcgaagttgcgagcagctccgtggcagggggccgttacggccaagttggttcgagatgttctcctttcacacggacctatgagcccgacacagctttgggaagaaaaagtgagaccagagtcattcagcatgactaatgagcaaaacttcgaaaataaggctcgtctccggcaaatctgccggtacttttgcaatcgaatcaagctggaagacggtagtatggcctttgcctggaacgagagcgaatggacctgaattaatggacacaacgagcgattttgcttcgaaagaagcaaagtgaatgatgtacatctttatcacgaccagctccgagcgagcgaaaaccctatgcgctccctgacatgcaatatgactatcgatcacttcgttgccaatcactaagcgaccttcagtcgcgtcttgggcttcttatccttttgattcaaaccgccttccgcctttctcttccctccccctgatgccaacttcttttccaagtcggccttttgttccagcaaaacggtttcatcaaccgcgagaacacgaccctcccctgtgcgtaccactcgcgccatgtatttgtaaaggcccatcgagtacctgtcttccttcgagagggctaccagatcatcctacgtggcgatcacggacagcaattagcattcaagggcgttttgttacgtatgagccggattgacttgcctggagcgacgttccgtacgccttccgtctcaacttgatactctccagcaggacttcgatgaccttgacgcctacaagagtctgatcgatcttgggcttgggagtcttgcccttgtctctcgccttttcccaaatctcctcgtcgatcaatagcttggcgaacgcaatgaccgcctctgggatttcgtccgggggataggtcaatacgaaagtgctatcgatacgaatcaatgatataggtcagctcgccccgtcggcccgatcaatcgacccatcagattctcactcttcctcgcctgcctctagccaccaatctattcgctcgccgagctccgtcttgcgcttttctctctcttcagcggtcttcgaccctgatgaccagacttgcaccgcagcgtcgagcacgacctcgccagtgatttctacttcgtcaccttcgttaccatagggccagtccctcgattcttcagacatcttggacagtagcgcttcgggaagaggatatacatcgacgtgtccatacttccgcaacaagtaagagtttgagggagaaccatacgtgttatactgcgtgcgggtcgtcgtttatcagtctagattgacggtcgtcatgttgcatacgtttctcacgatttgttcgcccttggcaatggcctttgtggtgaccatcttgagacaatcgtcttcgtgaaagagccttgcctgagatcgcgacggtcgaatcagtgaccttgctaagatatcgagttcaagttgaagccgaacattatcgcgctcataagccgcgttcaacatgtccgccacgggaaccatgacctcttcctcggcatcttcgtcctcgtcgtcgctctcctcttcctcttctggttcgtcatcctcgttgacggtctcggtggtctgatcacccaagtcgagggtcttgtcaccctggtcggtctgcatacttacatccccgtcggtctgcatggaaacgtcgccggcttcctggcgggtcggccttttacgtccagcacgagagctgggaacgctgaacgatcgcgagagaatccgagaaccttgtatgtggaagtgctccaacgagaatggtttgacagggagagaggcatcggactggaagacctcgggatatttctgtgggagcgcggatgtgccggggttagctcttgcaatgtggcataacagaacatacacttactcgaagaacgggctcaatcttttgcgtataagtatcctctgccgattgtcggccgatcttgtcaacaatgtccgtacctacgagttcatggatctgttcgtcggtccagaacatgggagtctggaaagtctttggcaaggcctctgtattcccgaaactactattgagcacagcattcggagacgtggctagtcatctcttactgatgtaaccgctccatttgctcgcctcgccctgtgcttcttcccacatcatcgatagcatgaggctagcccagcctccattctcctcaagcacgtcccagtcttcttccgctacaagactgcgcaatccagagttgcaagcagagagtaacacgttgtcgggtatagcgaatagagccgtatcttcctatccggcgtgatactattatggtgagctttcctcgcatggactcagccgaatcttctaggacctgcctcgatatctttgagtgcgatggctccccaacccattcccacatcactgtagtctttgataccgataacttcggcatcgtagaggccaccagcctgtttgagccattccaagatgttctcggccatgtcgaaaaggtggctttttgagatcgagagtcccgctgtagatctgtaaaggtcgttggagccgacttcggcgatcgcggccatgggaagttagaacaacgcggatacggatgtagcggctcaaactggcaaaaacgcactaccaaacaattccctatgacgttctagagggaggtcgggctgtagagatgcggggatggttctacattgccgcttgagaccttctgtagtcatatgcacgtacgtcccctgtgaactttcgactttgtctcgttcctccactttgtcaacaaatcatccaggcaggtcgtcctccagcatagtgtactgtgctaccattacaggtagtcttgtcacatataactcctcacttatcgctgcccgcaacagtgcaaaacaccgatataaaggtttcctctgataaacctcgaacgcatacctcttgcatcccgatttgctgatcgtcgcgaacggcaatcgagcctgcaaagatggtcacggaagcggctcatccagaggccaagcaatcagacaacttgtggaacgatgttcttgcaggagctcgtagatatggcgagaggttgccttcgaagcatgtcttggtcttgggtaaggaccgtggtatcaggcaagccgatgaggtactaatgccgcgacggtgcactgtgactctaggtgaaccgggacatggcaaatcgaccttgatcgagcacctgttcgacaagagaacttcgtccctgaatgcctttagctcgagctcgaacgcgataacctcgaagttatatacgccgatccaaagaaacgctcaagggtcaggcagaaacctacaaggatatcatgccaggaccacaggtagcttgagaggtcgccctacagatcagatcaacgggtccatcaacaaagaccaagaaccgatttcggcgggcctgccagcgttgagcgaggaggtcttgatagatgagaggctcaagagtacagagggtatggcggtggattacgaatgggtggaggtgaacgatgcggatattggtgagttgcccaagctcccgctcaacacgacgagagcctcccacgtattgatgacgactcgactctctcgccagagaacgttccacctatttccttctatacggctccatcgtccgatccggcaattttgaaatcgataccggctgcattaccaagtggctctttgcctgtgagcggaattcgaaccgtgttcaaacctgtcaaactatattaaagcgctgtcaatgcctcaaacgacgtcaatagcacacagctgccctcatcgtgctggactggacaaagccgcatactattgtgagggatactttcgccagtggaagatacgttctggtgtgtgctgatgctcaatctaggcggaggaattggctagatggctcgcctggatcgaacaatggtgttcaacaaccgcatcgagagccgaagaactcgatgggcatgacaagcgtgagttgatgggaaattccattgtctgagaatcgttctttctcgcccaactcaccatttgaacattcgcgcacccggtagtacaatcatacctgcagcattataccgaacctcgagcacagccgtcgtcagcgcaggctgggtcgggagatgtgacgggttcaggcacgactttcagccagacatatcagaattatgcggagactgtcctaccattgtcttcaggcgtcttgacccacaacaagtgagtcctccgcacggcctgaaagtcgagccttttggcgctgaacccatatcgatgatagatgcggcatccctatcatcatcgtcttgaccaagacggacaagcttgattctgtcggcgacgagcttgtttctcgagggatcgtcaaaggtaaaggtctgacttcggcgcctggcaagggcggtcagaacgcgtactcgacttggaattgggacgagagagtggattgggcattggcagctcttagagtagtcggtttgatgcgtaagtcggagccaggacctgtacctctgtctgtgctgattcgctgatcgatctgcctcgtagacggtgcgtctgtcttttacacgacgactggacggccaaccacattctcgacgctgcggcagtatattctgcatcgactctatgccaccccaccctcactgcacccgcaaccaagttcacctttggcccagcttactaacactgccaagccgaaatcgcaattcccctttccatatcgggcgaatcaactggatcgagactcgatcatgatcccagcgggttgggattcatggggcaagatcgaagttctcaaagagggttttaattgtcgagaggtcaacggactctgggacgcggcattaggtcgagaggctcggcaatatacccagaagaattcgcggaacgcagatgacggcttgttacaggacaaagacgacgacgatatcgagggaatctggcaagacgtgattcccgatcccgccaacgatcctttggtgagtcgggctgatatgagtgcctcggtcggctttcgcctgatgtaccgtctttgcagacgaatggtcattctacgcaaagagtcaagagtgcaaacgaacaagactttctgactcgtcagctcgagtcgttgctcaaggatccgcaccgagaccctcgtcgtgcgctccggcaagcagcccttgcgccacagacgcccacgacggggcgcaatcccagctttttgggtgaaagcttgggtttgggtcgagctacgccgggtgtcgttgggccgatgtcgagcgaaggcgtaaatatgcccaatgtcgagctggcctttgccgcgatggaaggcaggggcggtgcagacgagggtaccgctacgcctatcatgcctagaagggtgcgtccgttatgtagcgggttctggactattgcactttaacaatttccgctcccgatgcaggaatcgcgacaggcagtgccgtcgactgcttcgaaatctcttggatcggatatcagcgccaatacggcgtcgaacgaagtgcttaataatttcgtatgtctggggttgactagcatttttcgaagaggacgacaggcttactctcggaagtgttttttccaaccctcccagttccagggtttgatcgctggacggcgcacgcctggttccactccaggtaaagacgccgcatgaggacgacgatgggctcggcagagggcgatcgatgatgaacgcacgagtatctttccgcctgtctaggcgggatttgttttaacgacgatataacgacgcgcgccaggaacacttgttcagaaagcatatatggatatacatttgttacatttttttttccatttcggcaaatctagatataggcaagaggctcggacgggcgatagtttgatcatttcgaaagccgttgcccgatgcatgcagtgtgtttgtttgattctttgaggtaaaaatttgggttgacggggattttttgtttttgagaggggaagggcgaagaggtatgtcgaaaggattggctttgttgtattataaatccgaggcgggcaatcgccgagggaaaaaagggggaggcggaggcggaggagacggcctagtactgcccgtagccatagtcatagccgacctgaggggggtaaccctgatgcatgggcatgcctgggtagtatccctgaccggccatgggctgcatcatctggctctggtaagcgtacgggttatccatcgagtacgcctggccctcggggatcatgtgtggctcgtgcgaatgctcgtcaccacccaacttgccagggttcttgagaatggcgacttcatggctggacggcgctctgatctggatcttgccggcgggtcggggaggcgcaaagtaacctggaggcacggattgcgcaggatagccgagcggagagtctcgaccatagggtggcggggtgaacgtgccaaacgaatcgccgcgcgagaggtgcgggtgttgttcggcaggataaccaccaccacggaagtagggcccggcggcggggtgctggttcgggtagtagggttgaggagggaagggtccggaaggataattacccgggggtgcgggcgagtttgaagcgacaaacacgacgggttgaccggtagcgatctcgaagaacgagccgttctcggccatggcgatgcctggtggcacaaaggtcggcggagggggcatgccgtagggcatcccgttatgaggcacgtacgacgacgaggcgggcgccgatgacatgctgccattttcgctgatcggtacggcggcggacgagtcgacgcgcctcgatccgatctcgagccgtttcaactcttcgtcgagctgacgctccttttgcgcgatcgtggcctgctgagatttgaggtactcgatctcggcttgaaggttcaagttggctaccgtctccgagtcttctccatgatcggtcgagagggtcggaatcgagtttgggatgggggcggcgttttcgtgcgtggtggtggcggcgggaagcctgacgacgacgacgttggggtcgacgaccgtatgagcgggctctacgtgctcggcgtgaaagtcggtggcgggaggtgcgagcgggatgttgatcccagaggtagccttaggaagcttgacggtgatcttgccgtcttccacctgccgagcgacgacgatcagctcggtcgagaggccactaggcttgcgaacgacaagacttacgggcaagacatcctcgaaccctcccccgttgacctgtacgtcaacgggtacctgttgctgcccgaacacgacttgtcctgggtaatgcggtgctccaaagggttgtccgtgaccccatccgacagctccaccccggcctcttccccgtcccctccctgcgaaccctgccggtccgggtcccgcagcaccggcggctgcacctcctcgtaaagcctgttgaacgcgacgtttctctcgagcttccgatcgtttcttttcggcctgttccatcttttcaaaagcgtcgtgaccccatgatgaagaggacgcgtcggctcgaggtacggcggcggcggggacaggacccgaagtagggacgttgtcggacccggtcgacccgatctgatgatccggagactgggcgaccgtctcgacctcggcagttccagctcgacggtcgtccactcttgcccccattccgcctcttccacgcatggctccacctctccctacggggaaacctctcccacgaccccccctgccaccgcgttcggcgagagcgacttttgacgcggggtccctcattttgtaattcgccgcgtcaaaagtcgctctcgcccgatcgtgcgacttgtaatctgcctctcgaactgctacgacctacgatcagacattagagggtagaaagggaacaacgagccatcttcctatcaaggcgaccgtatctcttcaactcaatcgagatacagactgtcccagatcgtcatagagagagcatcctaggaaggctcgagatcgatcgccttttcataggtgtttgaagaatcgttttcaagcaggatcaggaacgctgcgcaattgaccaaaggcggtcatcaacgatacaaacccaccgttcatcccagttttgactgagcgacatgtactctccaacttccctcaccgtgctgcacttcgcgtctcctctcgtggttctgcccggattcgcatcgctgtttttttgcgcgcctgcaccgctcgagcaacctcccggtatacggccaatcgtcacacctcgagtcaaccctcgtcggaccctcatcctgggtctgatatcggcgattggattcacctactttggagatggggcaacttttgtcgctcgagccgttgtctccggactttgggacgagatcaagggggcgagctgggcggcttatgctatgggaaacgtcttcctctggatgacggctgcggtcttggtcatcgctcgtaatgggtacatgagaaagggtttggtcgtggcaacgacgttcgctttcttcacggaggtggccatcctcgtactgtctgccatcaatatggccaagcgtgagtcttacatatctggctcgatgacacgacggctaatcgccgtttgacgcctcgacagaccacgaccgctcagtttgcgctgtgcttcatctcgtgttcgtagtactacgagtgctgcatcttcccatcctactttgggctttctctaatcctcggatcacctttgagcctgtcaccccgcccagcgaaaatgatgctctactcccgcctggcaacggcgaagctgcgggctcgagcaatggctatggggctaccacgtctggttccagccaggtcgacacggaagctgctaacggaggcccgaatgggaagagcaaggacctgaagaagggagataggaagaaggacggcgccaatccttccggtggcccccttcctccttcagatatcacctggtccgagtggttctcccgattcgcccgactcatacctttcctctggccttcaaagtctggcaaactccagatcctcgcggggttatgtctggtgattttggtgctcggacgagccgttaacgtcctagtcccaaggacgcttgggaatgtggtcgactcgctgtcgagctgggccaagccagggcctaccgtttgtgagcttcgccttcaggtttgcccatacctcatatcgcggaatgcttacttgtaggcattgaccagcaccttggccgcccatcctcttctacattgctttacgtttctgtcaaggaaatggaggaatcctctcggtcatgaaccagatctttgttagttctcaacgtctttccggtcctgacgctacggctgacctgatcaacgcttgtagtgggcacctgtcatgcaatactcggatagggaaatgtccaccatgtgctttaaccacctcctcgatctgtctctggctttccatactaagcggaagacaggagaggtactacgaatcttggacaggtaagcacatcctgaggacggattggctgacgtatcgagactaaaaattgcgtgcggaaaataggggttcagcgatcaacagcatctttcagacgcttttgatgaacgttacgccagtcgtcttcgatatcgctattgctaccagtgagccacccccagaaccctcaatgctgctttgaaatcgactactgacatcctatatgcgaggacagtctatttctacgtcgcatacggtaagcatgcggtcacgcgagacgaatctgcttgatctaaactctgctctttatcacaggtcccatgctggccggtgttatcggcatcgtcatgatgtcttacatcgtggtctccatttcgttgacgacctggagaaccaagctgagaagacagatgaacgagcgcgatatcgtgactcgaggcattcacaccgatggcaagtggccatctgatctggcatgagacaaacgctaacccatcttgcatcttgcttgcagtcttgatgaattgggaatctgtcaagtatttcacatcagaaaggagggaatccgctcgatactcgaaggctatcaacgaatatcaaaccgtcgagctcaaggtcattggatcgttgaacgccctcaacctggtgcagaacgcaatcatcacctcgggtctgcttgctggatctctcatcgtcgcgtaccgcgttactcagggccgagcttccgcagcagagtttgtcgtgttcttgacgtatctgggccaactttacggaccgctcaatatgctcggtaaggttgacgaaatttgctggacgatatcgtgacagatctgacgtcgtctctccgctcaggtatgatctatcgacaactgaacgccgtgagttgctcggtttcttcattgtcggtcgtgaacgggcgggctcagactgattatgatgggtttgaacgtgcagaacctggttgatgccgaaaaactgctgaaactgctcgaagaggaaaaggaaatcgtcgatcaaccggacgccaaagatctagtgctcactgatggagtcgtggaattccgcgacgtccgcttttcttacgatggcaaagtacaagccctggatggcgtcagcttcacgatcgaaaagggtcaatccgtcgcgcttgttggttcaagcggctcgtgagtaccgttcgccaaggaagacgtccgcacgagactaacaatgcgatgccctgcttttcgtagcggcaagagctcactcctgcgtctgctgtaccgcttctacgatgtcaccggtggcgaaattcttattgatggacagaacatccggaatttaacgcagcgaagcctgcgtgcggccttgggtattgtgccgcaggagccagtgctttggaacgacaccattggcaagtcgagctgttcttggacgatgcggtgttagcgatctaacatgcgctctcgttcacagaacagaatatcggttacggccgtgaaggcagcactgacgagggaattagagaagccgctaaagccgctcgactcgacgaccgtatcatgggcttccctgaaggtgagtttgggcgatattttgacgcttgaaaccgcactgagtctcccgtggctttgtatatttgctacaggttacaagactgttgtcggagaacgaggtgtcaggctctcgggaggagaaaaacagcgtgtctctcttgcaagaaccatcctcaaggccccttctattctcattctggacgaggtaattctatttttcaccaacgttagcagaactgtactgaatacttgatttgcaggccacgtccgcactcgacaccgagaacgaaagattcgtgcaacagtctctgaacaatttggttagtcccgactcttggcgggggaagagacgggatactgaattcctgatttcttacaggcgaagggtcgaagctccctgatcatcgcgcatcggttgtcgactttgcacgctactgataagatcatcgtactcggtgacggcaaggtgcgttccggaccatcccaatcactgatacctgaatgattcgctcatctttaacgctccgatttgacgatccgatctgttgtcaggtgcttgaggtcggcacgcataaggaactgttgcacaagcaaggaggtgtgtttgccgccatgtggcaagctcagatccagaccgagacggaagacgagaatgctggggacgcaaccgccggacccgaggccagcacgaacggtcagaagacgatagacgacaagttcgaacaggtcgcaaacaagtctcaaaaggctgaagctgcacttgaaaacgatgggtcggcgactacgagagttgtcaatggtcaggctgcaccaggagcacctaggaagaagaaatcatcgttgccggatgatcagcacgcggacccgttcacggtggatgcggagaagggcccgtcatcaaagggcggagatgcacgttcatcccgagtagaggtgcagagtaccacggttcccgctagcctcgaggatctgtcatctccacctatactggacgaaggcaaagggaagtaggcgacttatcgccttggcgagactggtatgaccagctattgtaccatctggcgtcatgtcatgcgtatattcagcaatcgcttgatcctaagagaaggatcgtgtcagtgcataccgggaaagttggtctgtgcttcaacacaatctttttgcccgatgtacgcgcgcgcaaaaaaaaacgcaaaaaaaagagtcacccacaagaagaatggtagtcagccatcctcccccaccctgttcatctgaaaacgagcacgcatggctctatgggtagcacatggatatcgacaagggaccagaggccaggcagcagtgcctctggtggctaacttgcttgagctgcatcctactcatgatctgggttgacgaggcccagacatgagatgccattgttgttgctttatggagacttatggtacagattggctacaacaagttgagtagtcaccctttgagagcgcgcggatactactactggtcacgtgctgacgtcaccgttaatgaggcgaccaatctcgttaaagggaaaaccaaggttggtgatctgactcgtagcttgattgaatcatcttccgtagccattatccagtctgaggcagcagacatcgatatacactcaaacctaaggtgaaggcccaagtcctaccagtcatcacataacaccccccatatattcgagaacacacaccctgataatgtcagcgctcttgcaaacggcaatggccaacgcctcgctacaatccggtcatcccccttcgcccgccaagtctggtaaacgattgccctcggacagaggtcgagtccgctcttcggcatcggcgtcgtcgaaagatatgacggatgaagaagattccgaggatcacgctggttacagcgacgacgatagtgatgatgacgagatggtcgcgctcgccactcgtcctacgacgccggtaccctcccactcgagagaacgggagacacctgatagccccgaaaaagccggtcgtttcgtggctgctcgtgatcccgtaagttatcatcaagttctcgcagatgggccaatccttacgggacggttcgttctttcgtttttccaggtccggatgttgccttccagcatcatgctccgagtgtttctccagctggacatcaagtccctggcccgctgcgaccgagtatgcaaacggtggcgaaaatctcagaccttgaactacagtgagtatcgcacgtgctccgttcagatccctatatctatcggcatactaaatgacatcctctgttatcagcctggttcttacacacccggtcgttcaccttgcccgagctcaagaaggatcaagacggcaactatctcaatcgtcagagcgtcgaagaccccgattatgacccatacgacaaggcgcatttcctcaccctcttcaagacacccgtccctgcatcgacgactcctcagtggtctaaacgtgaatcaaagcaggcctggcgcctggctttcaagggcctgatcactcggagagaaaatccctcctcggtgccagacttccgggtagacgttgaagcattgtcgtctggattcgctacgcctctcggcgagccagagaccggatacggcggaaatagccgaccggcgagcggagcgtcgactccgaagagtaaaaaggagatgagagatcactacaaatcgctgcaagggcgaaagagcaagggaaagggaaatctaggcggtactcagaggggaatcaaggatatcggcggcgtaggcgaagatcgctattccgctccatggtagtcgaccggctcgtttcccaacttttgtaccttctgtaactaagccgactcgtactcataataataatgaacttgtaaacggatattcagacttctcgtttgaccttgccttgtcgatcccgtccatgcaggctcaagcttggcgtggctgacactaaccacatcgaaatcgttatcgtgatgtttcgtcatgtgacatattaacctatgcgttgtggctgagcctatctcatccctcaatctcatgcgtctttttctgcaaattgattgatagcggcggttgtctatcagctgattggacatcatgtcggggacgatctgtcgagaaacataccccttcaaagtgtagtgtccagctgttcaagagctttcttgcatttacctgctccccggttagactgtgtgacgggacatcgatcggttcagagcttatcgtcgatctcactaatcgatcagcaaacttacgaaggcgttccgtaagtgaatggacttaggaaccaaaaggttgcaatcatgatgaggatgagcccaacagtcactgccgtccctgcgggactcggcttggcccggacgattggccgcaatcgggtcttgagtccagccttgctgacggggtaattgacctcctcggtaatgacaaagttgaggacgctgccagcgacgagcgcagaagccagatgggcaggtaggtaatgatgcaggaaaagctgcctcgacataaggtagaagggcaagtaatgacaagcccaagctccgatgaagaagccggtgttgcgaaccatacggttgcgaatgcctgcaacagttacacatgtgagactcggatcgcatgacggggaaggttattaaactcacggttctcgatcggctcgatccctcgtcgtctcgccaaggtgtcggcaccaatgacaccgacaaagactgacatggccataacacagatccaccatgaagcgacgttgccgatcaggtagacctgcttcttctcgtcgttttccgtccagaagctgatcccactcatcaagaatggccagctgaatggcgagctctcatagggatgagtagccgtaagaccagcattgtgctgaagcatgaggacctgcaactcggcaaacttgaggaagaagttacgtttcttggcaggcttgttttcgacatggacggtgcggttcctaaagtcgtgacccgctgcagtcagaaattgatacagtcccacgattagcttccatcccatcttcagtctgccgcgaccaacttacacccatctgagatgatgtcatctacaaaccagatgtttgacttgtccgctgtggccttatttccgttgatctcttgttgtccataagcccagtctggaagtttgctgacgtgagtccagagggcaaccttggtaggcatatgaatcagcttgaagtgaccgctcttgcttcggaagggctctccctcgtgagcgtcgttcatctcgatctggaacaaggtatcgttgtatcgggtagtatcgttgacaggccaggtggtaaattcttggttggtgggcatgagaggcgaagcgacatcgtgcgtcaagagattggacagcgtgttgacgtggagaagctggacagtatcgtggtggcgaactatacggcctcgtccgctggtaggaatctccctggtaggaacaatctgccaatggttattggtgtcgttgtgcggataacccgtgacttgctggcctgtcagtatgcacaagggcaacgtcagcacgctgagagcggttcattcgaagggtaggtcttcctcgactcaccttgcgaactgattcttccgtcatcgtactgcaaaggatatcggtcgaggtgcgagtgaaggaaagttttcgtatctttatgcttgaaagtgaccgtatcgtagtaacgcagctctaccatacatcacgcaaaactatcagccaacgaagggtaaccagcgatgcggctgcgttctgctcaccttgactgttcagcaacaactcgttgccccgcaaggtctcctggaaagcgggagacatgaaggtatcacctgggcccgagtagatgaggagcttgaagtggatccaaaagatgaagagatagaccatgaaggggaatacgataagaccccaagccctagccaaaaagtgcctcgtaaaataggcctagagggatgtgccggtcgaaggtcaacgatttcgtccggcgcgtatgaatcaagacgctccgggcgacttaccatgctgtgcccctttttgatatcgaggattccccacaaatcccacaagacggctccaccgacggtcatgaacgtgaagagtccgaccatcttgcatccgagggtacaagcgaggaagaacccggttgccatgaggtagccccaccactctggtgtgaattctctgaaaggtgcgaaggatcgttttttgtttcttcagattcctgtcgacgcattttgcgcagtccaagataggctcagactcaccggtatcgatactggtggaacttgatgtaggacaacaaggacaagctcatgaacaggatcaatgccgcgtctagcaagatcaacctcgattgcgtgacgtgggcgttgtctatacgatccccccagtgcgagtccgagttagctcctgatcctagcggtcttggtaagagggaaggggatacgcaccgaagaggacgagacaggcgctgaatgccgagacgacgatcggataaccggattccctcatgatcccgaaaatgatgggaacggtcaaagaccccatcatggcaacgaatccacgcatagccacgtatggcacctgcgtaccggcgaaaaagaggaaccatatggtcatgatcagtctgtcaagctcgtctcgctcctcgcggcgtacgatcgactcacgttattctcgccgtacttgtctccgatagcttcgaacccgaaatcaccgtcgaacccgctcgcccacccggccagcgcattaagtagcttggccaagggaggatggacgtcaaagtaatattcccttcgaaggtactgggcggcaaatgctccgaagtggacctcgtcgaaactgcgtaacagcgaggtcacgtaagaaagagatcactcagcagcctggccgttagagcagcatcttgatgagcaaggccgtaactcacactacctgatcagggtaaccgatcccccagaaccttacggccgcggcgaaacagaacagcgcgatcccggtcaacaggctcgcacgtttctccctcttgatgctttccaacagattctttccccgcagacccgcaggcgcgcctgagaaggtgctaggagattgaaggggtttcgagcgggactgcgaaaagaattcagatggtcatcagtccggtccttctgtcatcaaagactgatcgtcgctgccccggggcataccggcgacactgatagctcaccttctcatcctcataatctcgctcggccaagaaaagctcttcctcctcttctcctcgaactcgtctcctctgcctcgagacggtatcgtcgttcaggtgggcgacataggccgtgcccccagcttgcgggttgttggccggattatacggattcatcggtgaccgtcgtcgtcgtcgtgacaatgagatagtatctcgaggcgtgctgagagctgccgtgaagagagttcgacgatatcacacatcttgatcaggtcaagaccgactgatgtacgatctttgaaagggatgcgtcgagttggctcacagacacgtctcggttcaatttacatccgaatgacggcatcacacgatagacttgatgacgtaaatacttccgcagcgtctcttctatcacgtgatgactgttcgtgcttggaaggtacctcaaccaccatccagcgtcattcaacaggtcgtgtaatcagtcctgttgatcgacccgggcaagctattcaagaacagcttgactgacaacaaacacctagagtcagtatctgaatcttgacctggtattgaacagttcagaccgtaaaagctaattcattcgctggtattgctattaccgtggtatagctagcgaaatgtcggtacatccagctcgactgttcaggcgtaggtgcggactggcgtgcggaccctgccagataatctctcatcctagagcggaaagggtgcgattcatcaggaggttatcgtacgaaccatcaaaaacgagaggctccgaaaacacgggccttcgctcgccacaagcccactggcagctcagaccgacacacctactggtgacagtaccttgccggtctcaaaaaacgaccaccagccgaccgcacacgaccgcatcgccagcaataccgcagaaggtctcgttatcaccagactcagcctcgaaggtcaacagcggcagacaagcaatcgcaacgagaactcggcaacgcctagtcctccgttcgggtggcttcgggatccccaaaccccaccccccaaccactctccgagcttgcctccgtttgtaccaaggtcctaaccctcggctctacctaccacacgacgatagaacgccgcgacatcggacatctaccccaacatccccaagaccatctcccggacgttccgacaagagggactgcgagcgttttacaaggggttgggcacgaacgcgttgaggatcttgccaggcacgtgtacgacgtttgtggtctatgagaacctggtctgggggttccgagggatggcggattggaaacaggggacaggaggtgtgccgggtgaaggagagatgttggtaggaggagctgggacggatggagcgattgtaaagagctgagaacgggtcgagaggtccacaagtcctgggtcggtcggtcgacgatggatagatgacgtcacgcgcatttcggtcgtttctgtgtttgcgaatggttgcttgatcgatctactctagctactcgggagggcgttcatctgaacctttgatacggctttgacctcttgaccagcgtctcatacggcactatagttgggtaacatcatgtccaagcgaacactcgacgccttctttgcagctcctctgcccaaaaagcagaaaaagaccgcgctgtacaagcaagacagccaaggcgtgatcgatctggaaccttccctatcgccatcaccactgccactgccaatcaccgcatcgaaagccgaaccgatagagatcgtctcggatgaagacgaggacgatgggaccgctccagccaagacaacagctcctgtcatcctgaccagcacgggtttcgccatcgtagcacctgaccgggacgactcgccatgcggacctccttcaactcatcctacctatcctttccccatcccatccctcccgaaacaccttgccgacaacctgaaaccctcgaaagaacccagggtcatcaatgacggtgtcgacctggatctgctctgttatgagccgtacatgaccgcacccttggctagggactatggagaattcttgaggcgggagttgcccttctaccgcgtgcaatacaagatcaatcggtttggcaaagagaccgagattaacacgccccgatatacagtcagtatctcgttcgacattttcgtatgtggcgcttacaaacaccgaccccggtctcccctgtagacggtctttggcatcgatgacacgtcccgattctcaccgaccggcgagatcctcgattcgaggacaggcaaaccgtcactggcgaacaagtacaagacctgtcgaccgcgcccgatccctcaatgtctccagtccttactcgacgctacttcagaggcgacgaacacgacgtacaatttcgccctcgtcaactattacgcttcgggacaggactcgatctcgtttcactcggatgacgagcactttttggaaaaggaaccagcgatcgcgtcgtttagctttttagcggcgagggatttcttgttgaaacacaagcccgtcaagcaacagggtcaaccggcagcggaaggcgtcaaaaaggtggacgagaaaccgataaagtttaatctgaccggagggaccttgatcctcatgcggcaagtcccggggggaatgtccgctccctagtctgttgctgattcgtcaattgaccacaccgcagaggaaagacccaatcgaactggctgcattcgatcccgaaacgagcctcgaacgggattcgcaccccagccatccagggacgtatcaatatcacctttcgaaaaaacatgacggcggcagggaccgagaattattatcggtacaacgtgggcacgggaccggtctggaagtgggacgagcagaaaaaggagatgaagccgtacgcgaccgagatggcgaggcttgatggtgtcttgtagatcgagaccgtctaccaaaatcatactcgactatcactccaagacggatcgctagcgatttcgttgtcgcgtccggctgcagaagcgtcttgaccgggatgcgcttgtcacgcgtcgaccatagcatcgcacgggtatatcgatacattttaggggctattattacactaaagtcgatgccagaccggccgaggggagtattttctgcactagcgactgacgccctgatgtcgacctatggggaaggtacagagatttctacatatcgaaagattactcagaaaccgttgttggcacagctaaaaggactcttgatgctgccgagggcgtaagagttgatgatagactggacggaagcataggtgccgactccgagaatgaagaatcctaagagttatcgccacacaagaccgtgtcagtttttggagcggtaatgggcatggcgaaggggctaacactcaccgacaccgatgagaatggcacagacgacgctctcgatcgcgtgtctgcccctgaaaggcttgccccagttcatcgcaaagtaggcagctccccagaagatgtaaccgaaccaggatccaaagagcgaactgactgtaagtcgcggtgtctgttcagtataatgtccaacgacgaggtgacaactaccgctcgcgtgctgtactcactgacgctgagcaaatctccaaagaaggggatcgactcgccaatgacataagccaagacccagacgacggtcacgattccgacccaggtaccccaacccttgacggtatgggtcctcctgtgaatcgacttttcagaaaagatctggaaaaagactgctcgcgaggtgaccaaggagtacagcattccgacgatgatctgcgcgcgcgggatgagagagtgtgtcaatatgcgactctgagaccgagcacgtgggcggactcacaatggtagggagcgtcaacgcggcggcggtatatcgccaccaacctgtcaaggacccgtatcccggagtcgtggcaaggggacctgggagatcatcgagtcagtcgtacgcattgccaatgtcgccatcatgctcggaacgtaccagtggtgctgtagacgacggccccacagatggtgaacagcaagacttcgacggacattgaaatgtagagcgccttggggaactcttccgggttcttcatgtcgccgacaaatgacgggatcaaggcttggccggtgaacgtgtagatgatgttgagcagagcgctgacgccctgtacaaaggtcgtgcccttgggagcccaaacagtccagttggtgggcgtctccatctcgctaatgaacccgttaggatggtcctgaacaccgtggcctgaggacgcaacggttggaaaagtcagtgtccgtccgctaatttgagcacttctcgctctcgacccaccaatgaccacaaaaaagaagcacaacagcatggttcccgcgctgatagcggcggcaaactcggccttgctgaaacctcgaaccagagatccggcgtacatgataacgcagatgatcaacccccagagcgccgagcaaaaggtgtatcccaaggtgttgatggcgacggatccggcgttgacgtgcaaacccatgatgaagatgttgttcaaggccagaccgataaacctgtggatgaagggcacgcggatgagcgcgcgggtacacagagtcatctttgcgccagtctcacgcagcggtccaggcgatcctgctctttccgcaaagctcataggcgacatcggcaatgtctctgcaatcgacgcggagatattcagtcaataggctgctcgtgtttgcgcgattggaccatgcgctcaccgaatttgagggtgtcgcaagcagtacttccacaagatgagagaggtgtaaagggtggtaaccgcgacgatcatcgtggtgatgatacctccggccattcccaagacgctgtaagaccaggggaacgccaggatggccaggacgacgtattcgactgtgacgcatcggacgaaaatgtcagcctggtcaggtcgaagcaggtcgagtaccatctctggcccttacccagtagcaacgacgtcgtctgaacgagcgtcaacgacctttcacggatctcgacgacctcggaagactcgtcatccccggtgacctgaaagaccctggaatcggtcttgatcaaagtcggtgcgccaccgggacggatggcgttcaaggtcgagttttccgaatcggtatcgatagggactcgtacggccttttcgctggcaaaaccttcggcggggctagccccgggtagaccgtgatcgatgttggctatgaaaacgtttggtttagggagggtctcgaggatgacagcgcgtcaagtctccaagagagcgcctcactttcgtatttggcgaattctctaggcttggtgtgggtggacatgttgaaggagattctctcgagtgaatcgtgtctacggaataggggctggtgcaacgggtagcaccaagttgaaagatggtttaatagcaaaatgaattcaatcagacggggcgatcaacaaggatggtgggcgactggttccagaacaaatgagggtgctcgtatattaaagggcactggaggccggtcattgcctggcatcaggaagtgagaagtgtgggactttttcgcgcccatcttgtctggaattggcgatccccttcggaatccagcgacactcgcagccttgcgacgtgacgtctctcgatcgccggagtgttccacaaaccggttgacaatcgataaaagatgtgatatcgcggcgatgccccctttccgtcattctccgttaaccccccaccattttctcgaccgaggccaacgtgctcgatggcccatcctaccaccaccacccatctgcgtcattgaattcggctgccttgtccacgccggcgccagcctgtggcctcgacccaaaatgaaaagttgactatagaaaacctccgtgatcgaatccccgcgcttcacccaccttggtcgcctactactcgcctagccagccgcatggtaccgtacctcggtcaatttttcgccttttcttttttgcttccgacctcgcgcgagatctcgtctttgttgcgtgatcgccggtcaacatgcacaaagggggggctccagcggaacggagcaagacgacaaagctcgggcatcgatcgatagtcaaatttctccgttggccgttggccgctggcgtcatttcatggtcatgataaggatgtgcgtcattcaaaacaagtcaagggagagactcgattcgttcgggcgttgcgcgattcaataatctcacggtctaaagatggctccaggcttgacggggcctgaaccaccagcagaccgtttctttgcatggccggggtactgtctcgtctcgaccgcggaagaggcgccctgccattcccgagtcacagagttttgcatcgtcgggaccggcggatacccattgtaccgagtttgttgagggtattggcgtggcggtgtgtcgtgtcttcgtggattcttgcgtctactagaagatgtatcgtcaaagccttgttccagcatggcttgcatttcgttggcgcccatggtctgtcctggcgttgccgggatctcatgggccagcatgacttttgggggaggcaggtacgcaggggccgtctcgtcgtactgtgataggccaggtcagtccacatgtcgctgacaccgcgaccagcccaggaccgccgactcacgcctcccacgtctgaaccccatacatcgtccgatagactcgacgtctcggatcgatcgtcccggtccacgaacaacatgttgcgcgactccggtagaccgtcaaagtgttctcggtgtcgacgctcgagcacctcggctctctgtcgtcgtttagccacccgccgcagtttacgcagcctagaccgctcccaatcgctccatttacgcagggggatgctcgtcccgtcaaagatggcagtcttgtcttcatgaacaggtgcaccggctttacctgccacctgacgtgtagctccccaactcaagtctgcaaagcgaacccaggtcagccacccccccgcctccgcctagcatcgatcgaaccgggccgtgcagacccaccgtccatcttgatgaagctgtaggctggcaggacaaagttccagatgggcaagctcaacaggtaaatgaccatccagccgacatagaccaccctacgcgtcgttatcaggacgagtaccgctggcagtcccaggaccccgaccagcaggatcacggggatagcctcttggaaattcgtcggcggttgcaatgcagtgttgatgatcaacgcatatgtcaagcatacggcgacggggaggacgatcgtgccaaagagcctgtatcccatagcgatcaacgcaggtccaattacgtaagaggccagctctcactcactcgagcaggacgataaaggacattgagcagcagaatactccgcatagattcggcacctgaagcagctcgatcaggttgtggatcgaggagcagatccaccgtcggcgttgcgatagtagaacggaaaaggtgtctggtaccagcgtcttgcacttggcagcgctgcaaaacatcattttgcgtcgcggaaagtttcggatcatgagcgtactcaagaagcggtcctcgcctgggatcaacaagagcgtcaacgcggcatgtggtcaaacacgtggctgttcctgcgtaccgagttccagcaaagacttctcgtgcaagctcgccggattactttgactgtattcttggcagacagacggttgggctaagatgggtacccaatcatctccttccgtctttcgaacctgtacagacgtctcgatcagccgtcgcggtcatagtcagctgtggtccacgtcgacagaccttgagccggtaaatgctgaagcatccgggaagacatgatacggtgtgtatgctcgattcgaacgccttggcctgtggatcgcgaggctcagtgcgcgactcgttatctcgacgccgactctgattcctcacctgatgatgagaaataaaatactcgaacacctgtccatcgattgacgatccacttaggccgcgttccacctcgcactgtatgggacttacctgaatcatggtgacccaagaggcctttttgtttgctatcgttgtctcgccacagagacccatgatctcggggtctttgtacatgcaatttacgaggatccgaagcgaagacgggtaaacccgcgtatcggcatcgacctatcgcacaaaggtgcattcaatcacgcgattgcttgttcaatacgcggaatagcttaccatcaagcactgtcagatgacgcacgtgaccaatgttagcacaatcacgaacgcaaagaaccagcctgcatgctcaccagctcaaagtagtccgccgtaacgccacataagacctggatcttcctgaacaggtcataatcaagcggactgaatgggtcattgtagttgactcgagagatgaagttcatcaagatcatttgcgaatctcgtttgcctcgattgccaggcttcctctctcctgcctctcgaggatgtccagtcttgacgacaatcaacattggcgtacgtctgccctttgttgaccctgcgatcaattgcagcgggcatcagcaagtacgcgagtatcagggggcccatcagacgcactgtaataccccgcgtataccttggcttgattctcccgtttggcaccgacaccgacggcaatgtaacccatcccttcgggattaccgaaccgcgggtccgcctcgagcatgctgatacagatatccggcgtgctctgcttctctccgctccccgtgatcatgccatcgcaaacgacaaagagcagcttgcgactgtctggaaagtcggtattgctgatcgaatccaaggttcctctgatcgagtcgtccccttcgctgtaacaggtgaccagacacaaggtatacagctcttgtccgatagctgacaaggggatcatcggagcgggcgcggtattgaccatatccagcgcgtccatctcgtccttggtctcttcgaaccgaccgttctgactcttctgcttggacaggacacccttccgagcggggtcgtttggtgctccggcccatggggccatgccattcgcgtcgtgaaccgtccgatttgctcccgctggcaagaccgacggactgatcaccgcctgggacgatttgggcgccggcgagctcatcctcggggccaggaaccatgcgaagaagcaggccataccgaacctgatgaggatgatggccatgatgacaacgagggtgacgtaaagcaagatggccgcgaagaaacagcctggatacgccagaccgcggatcgtcagcgatgcaatggggcggccctttgcgcttccatcaaactcacccggcgtcatcttgtcgagcgtcccggcggcatatcgatccgtcaagcatctgaccgagcccaccgtcttttgcgtgttccagaacaatttggtagcatctttacccagggtcgaattgctccctgctactgaccggatgatggcatcgaccggatcgtcggggatggccgaggggaacagttttaggtagggacccaggttgagtactcggccgttgacgaccatgtatccaaacagcgagttgacttcgtcccaatcgtagcccacttcgagcgaagtatttcgaatcccgagcgcgttgaacgtagagtcgtttggctcgggcaaggggcatctagacgtcggcgagttggtgcctgtgctgttcgtaccgcacgggtccatggtggcataggaagccgtaagcccggcgcacgaggggaaggatgaggaagagcgggtaaagaggttcgaaatgtcttggcccgagagttgcttggacaaggcgtagaaatccaccgatgccgtcggcctcgaggaagacacgttgaactgccaacccgagattccgagcgtcactgcgagtgtccatagcttgtcagaccggggtgatgtgatacgccgaggtggatgaccgactcactgtccgtcttcccgactcgactcaaccgcttgctcgaattggcagcttcctccgggcataaagtcctttgcaaccccatcgtgatgaacccgaccagggcacccaataggacggctatccaacaaaaagccaccttttccctccacgcctgtcgagtggcatccgaatccaacttcataccccttctcagaaaaacatcagggatccaccaggtgaacgccagggaagacaccttccaccagttgatccccctctgatccgccggtccgccaaaggtcgacgtaccggcgatagcgacgtttcccccactggatccacccctcgagccgagagcacctccggatacggacgggttactcaacccgggcgtgctcagacgagggttgatgagcgggacgggagcgacggctcgttctggccgagtgagcgtcttgcccctgcgtaataaggagccggattgtttacgggaagtgaccaccgggcgggtttcttgtggacgaggtcgatggagacgtcgtgcgggttcatattgcgtgtggtagggtgatgggtcgtgtgaaggaagtcgttgcatcgggagggctttatgcatcgtctgcctgtgaccaggcgaccaggaatacggcgatcgagggcgggtcctgctctaccttgtttgcttgatggtccagtgatttcagccaaagacgatgtagatgatgcttgagacggttgatgctatatcagaggccagagtgcaaagattcgagtggtcgtcaatcgtgaggtcgtcaaaggtgatctattcgagccggtccttgatggttcatgagcagaacaagtgtcgttgtgatgcaatcgggtggtccggcggtttcttgatcgtcaagcaaggtcccaatcagtatcctatgtgccaaaatggttcgtcgcttttcgcaagacctttggtctaattccgatcaaaagctagatgctagttgagatggtcccgctcgtcctgatcgtagcagggtgtgctcaaagcttatggattagccagccggcaaagatcagatgcttgttacggattgaacccagaggtgcatgcttatcagacaacccgaatgaacagagtatgtatcgtcaaagaggtagttgtagtcgacgatgttgacttgaagttgcaacaagttccgaaattgagctagtcacccgagcgagatcgaaatcaaaagttaacaagcctttgcggttgggagcacgggtttggggtcggggtcgggaagtaggaacgatgggtacaaggggactggagatcgagcgtgatgatcgtctagtcgatcatggcacgattcctagtcggacttgcgcgtcacgatgatcacgagactttacaacacctcgataaacatcctccggcttttctccctcggcaccgactgtcacccaggaccccgacgcagacccaaatcgccccggatctcttgacctctgacacaacggtaaaattcggcaaagaccaagactgactattcccccttttctcgcatgtacagcatcgggtaccgtcaaaaaggtcattgagatcaacaagtacctcttggggaccatggcgggaggtgctgcggattgtcaatactggtcagtcgtcgtcgctggttttgccatacatacacagggacacccagctgatatatatttgcattcactgtctacgtatctctctcgtccggacctcctccatcactccaatcggtattgcgtgtgcgtgcactcccctcggttatcgaaatgtctcacttcgaccatggcgttggaccggcgcagggagacttacttggggatgcaatgtcgcatgcacgagttgaggaacaaggagaggatttcggtcgctgcggccagcaagatcttggcgaacattgtttacgagtacaagggccgggggttgagcatggtcagttccgagtgtgcagggatggggaggatcgggttggctgataatcgagcgttcgggttggatgatcttagggaacgatgatctgtggttgggacaagacggtgagccgatacgaccagggaaggattcagccctcgacgaacacgagctgacgatcgatcgttgtgcgtgacagggcccggccttgttctacgtcgactcggatggaactcgattgaagggagacatattttcggtcggttcgggtagtactttcgcttacggtgtcttggaccaggtaggtcatgtctctagagacgacccgtgtctcgcccatactcacccccgagatgcacgcttttcgcagggataccattgggatctgaccgacgaggaggcacaggaactcggacgacgatcgatcgtcgcggccggtcatcgggatgggtactcgggtaacaccaacaacctctaccacgtcagggagaacggatgggaattcctgggtaacctggatatcagcgacctatggtacaagtacgaagaggaaaagaagaatgcgagaaaggaaaagaagacggaggagccggtggtagagagcatgcaggtcgagtagcggaaggatcctgcgcgtgtgtgtgtacttgaccagagaacgacagagccgtgtatgacgatatcatgatcatttttacgtttcgagtatatcaggtcagatagcgtgaggagaaatgacggctttgcagttgggtcatgccacgcgacgtaatctcgaatcgtcatccgatactcctgacttattgcgcgtattgactatggatgtcgggcgcggaatgtcggtggtatgaccggatgacgtagagtgcgtcgaaacccggtgtggtctgacatatctacaggatgccaggtgaacgcgaccgggaaggtgcgtactctcgtatatcgcgttcatcatcaacggcaacagatcgacctcgtcgtatcgcgctctgcctttgagttacgttcgacccctttaaacgctcgcgatcctcacaccgggctgacagttgccttgcaggaaattgcgtactccgaaatggtacttaatgaaccgcctcgaattgagaccccaggaagtatgattggactctacctggcatttgctgcggtcgagcacaaagaggagctttaaagcatttaacatgagcctgcctccagttcaaaaccatcccactgaaacgggcagctgtcatgtggtcgtgatgatgaatgaccttgtgctgtgccctttttgaggcgacggtttgccagtattcagcctatagatatcatgaggatggtcaaaagcagaggtgggtgtcctgcagctgccgacggttcttcttgcgcctcaagtattgtgggctaatgtcacgcatgcttccttaccgtggaacggtttcgggagaatcacgactagaaaattcgcttgcaatcatcaaacgactcgccgagggatgcggtacacaacaagacggagtggacccctttgatcaaattacgtgctcattcactggatttggcaaaacgctgatcatcacccccgccaagatgctcgcgaggaaaccgtcacctgccaacgacctccttgtcaagtcgacttctttcgttcacatctatcagactggagcggaataacgagacggcgtcgttcggctcgagatggacgtagagcagagtatggtgatgacgttctggatcttcaacctggcaaagcacggttatagcacctccgtcatatactacctgatgctactgacgagtaacccaagccaaaaagtcgctcttcgggtgaaacgagttctatgcgcaatgtacgagcgatggacgatgccttatccgaagagggagaggcagcagatgagcctatctcattggaaatctatcggttctctaaacgcggcgagaagagatatcctatctaattactccagttcaaacaagcgtgatcagccaatgggcagcaacagactgcgcaatggcgcgagatgtaggcgaaatgccacgggcaagatgtagctaatttctcaggcaggtggacaaggcgaacactcgggtatggcggcaatggacggctttctcttcggttcatctcatgaccgatgtgatcaatcctctgatagaagaaggtgagtgactgactgcgtgcttattgtgtctccgcacgacatgatttggattgaagacttgacggcccgaacaagtagtgcaaattgtacatgtatatatactcatctgatagtcagtctgaagatcatgattgtcagtccaaaacgcaggagcgggacatcacaccttttgtcaagctcttcacccggtaagccactctagagcaagctcatttagtattgtctcatatgaacccatgtgaaccatcacgaatcgatgtcctaccagaccgaccaaggtccgccaaggtctgcgctaatggcaccttactggtcatggaactccagcgtaccaaccacccacacaagttccacctaagacgacgggacaacctctttgctttaaatcccggacgacatctactttaccgtctccgtagaaactttggacggaaaaaatacctcgattataatggtgaccaacgggcaacgagaaatggtccagcaattgatccagttctacttggttgatgttacatcgtcatcgcgccctttttgaatgaaagcgcggtccagtccgtatctctaaggctcaggtactcactgctgaattgctctctggtaccataaattggaaattcttgacagtactttccagaccgacctgtgtggaggatatggtttctgttactagcaggtgcacactatgctgatcagatacagggagaagatacagccacccgtaatgccggatcgtttagcctggggcacaagtgcgagtcgatcatcaggggcctgttcaaccttccgtccaggatgctctggcacgctaatcaagttctcaggaaactggtggttaacgaatggattcagctgtcggcaatctttgaatgggataagaggcgctacattactccatgtgtgtacgttcagaccgtcgacgtaaagttctatagaggacgcctttatctggtcattgtgatgcatttcgataaccagcttcggactgattggccctagcgttcagacaacgatcgaaacagtgacacaggattgttgagtacggcatttgtagccaacttgaatcggacgctccgggttaacgacgtcattggcatatgccttggctccctcaatacgtacgagtacgtatcgatgaattgcgactttggtcgatgcaatccccacgattgctacagaaacctcaagtcgtgtactcgagactttcccacacggcgattagaagatgatccgacagactttttgtgttcatctagtcgcccctgattcattgtcccttggttgtcgctttgtcggttccgttgataattgagtcaaacttcgctgattctagctctgttcccgtgcatcacattgtgcttggctatattgaaggttgagtgaagcgctcgacgtcaagacgagcgcgattccaaccaccctcaagccgaatggctaatttctcaagcttcaccgttccaagtgaagggacgcgcagatcgacccagagaagcgaaatgtgaactgctcgctcctctgtattcactggggcattcccaagtaacgtactcagccgagtaccagcgtacttaccttcatacgtacatggcatactcgcatgcgcgtgctgcaataatgtcgtgattgacaggcgaacaaagggactgcatgctgcgggatagcgtccgcgtgatcgatttcatgccctgacgagtataaagcttggccttgcctcaggtcaatctggcagcgaatcacacgatggatacgttgttgacggatcacacagagcgaaagtcacaggcgatcggaagtttgacatctgatcatacatcatggcttccactcacactggttcacagtccgagaatgcagctccatgggccgttgtctctctggatggagaaacggtgaatcatgaacccttgacaagctggagcatggtcgacacctcgcccttgacgttcgatggtacacgctgggggcaatctaacgcggccccgacaaaggccatttccgacggcgccgatttgacaaggacagacagcgcgaaagcactgatcagagcttacatctcaggttgtcctctacacgcagcatccgaaataaagcgtatgttggaatctcccgtaaccgtccgatcgtcaactttcacgggttcgaggagttaatcacgggttcgaggagttgatcacgggttcgaggagttgatcacgggttcgaggagttgatcacgggttcgaggagttgatcacgggttcgaggagttgattggtctggctttgaatctctcctagaacgatttcgtgtggaagattcactgggatactaacgtcaacggcaaggttggacaggtgcctcttcccgagggttccgattacccttacaaatttagcaatctccgacacggcgagattcacgatcacatcaatcacggcctctttctccggagcaactaccagcacatcacccagttgcaaaaagggcaatccttcgaagtcgatctatacgaatacggctggacaggaggtccagctgccactgtgttccatgggtgatacaactaggatacctgggctagagttgacagagtggagttggagagaccggacgagaaaatctatttgaccgttcagttctggttgcagaaatttcttagtagccctcgtccataactttgcttctcgtggaacgacatgaactgtaatcggacatccacggccgaggggaatgtaatggagtgaaatgatgctaaatggtacactcaaattagtcctccgatgacgtatatatgaaaaactaaatgagcgtaccgatgatattgcggtcaggactcagaaagatcaagttcgagagcgcgactcgatggacataccttacggttcatttcaacttcaagaaagagcccgcgaaagaataggcagactttgtacgatcgctctgtcttccattgtgtcaatattcatcaattgtgtcagcttcccattgcccctcgatccaggcctgatgcaaaattttgtgcttatgtgtaacgtcaggatcgagtggaggagagtatttatgagcgagatttcagactcctccctcggcgaaacgtacaccccttgatacattaccggcataatcaacggaggtccagattgcgatggagaagcagaatcagatgagctcatcagtcacctgatgaagaggagctgatcacggaatcgaccgattaccgccgcagattcgtggtcactcggcccaggatgctgatcgtatacgctggtatgtcatcatcgagaagcatacaaaggaaacatatgaaaggagatattgaagacgcgatcgatcatttcacaaagcgcctctatcgcgacgagtaaatatacacagtcatctaacaggctcgatttgccaatagacaccatgctagaagatgcacatagatcctgctcgactattatcggacaagtcagataagcaacctcgagacacaacacatcaccacagcatggcttctctatcctcatatgcctcaacgggggctccgtctaccacatccatctgatctgcgtctgtagggggtgttcttactgatgtggacttgcccacgtcgattttgcaattcgatacaactcattcgggcgaacagaatcagaatggcgccacaagggagctgaaggatgatctcgtaaaaaatgcgatgaaattggtcgagctatacttcacagggatcgaagccagcaggttacagcaaatactcgctgcgccggtaagtaaaaaggctgtggggtcgacggaaggcaaaggactctgtagaagaggggtctgtcaatgcattactaaccaggcgaccccaaatgcagtcaggctcactctggaaggtctggtgggacacttctccggatggaaacgtcggacaaatccgtcaagagcacgggcacaccgctgctcccgtccccgcgcctatgtacagacacagccttcatccgcaaatttacgacccgatgaatcttctcttttctgacccaaacaacccagacgctcgggagacgatcgggatcgagaaagggcaacaactcgactgggatgttttcgggtatgattggagagagttgatggaaatactttacggtgatcagcggatggtcattctcgtccgcatcgacaaggtcaagctggagcgacctaatgacaagctctatctcactcttcagttctatatcacttgccacgcccctcatccagaggaccagacctagtatggttgagacggtgtgactgtagaaattcataggtctggtctagaaaatgaatgtgatgatatcgaactttgacgagtacgtttgaagagtgaaacacgtgagcatcgacttgccaaattgaagcgcgatcttgcgcgatgcagtccatctaggcgagtgtcatcagccgccaagaaactaggaaaagaccttcgaggtgtgtaagaatcagctccttcagccctaatcaaccaaggaacacaagatggtgctaaatccaggtacccatagagaacaggataaccttacaggactaaggtacacagcgcctcaaagcatgttcgtcgtgccagagtgaccaagatccagagggacattctaaatgtatgtaatggtcgaccaatcacgctactacatatggttcgtcgtgcataattacattcctaggagacgcatgacctagcgttgcctagacgtcggcttcaaaaaccccgtttctctccgtgaaacgcaggggcatgacaagtgtgcgttttactattgcctcggaatgacgagaagggcatactatctgtacgacacatgcattgcgtctcaccgtagtcgaagtactcgtcagccacgacgggttttggatcggccggcgaaggaacgtcgcctctattcgactcttcgcagatggtagccgtgcagcggcggcaacgccttcaagctgtgcatcatggcatatgaagttgggtcgcgagacctgtagacgatgactggcgtcacttggtctctcggtgaatttttaggggggtatttctgatataatctggacacttacgccggaagccaaacccagtggcggtagtcgaaagtagaaggtttattctctcattcatcctactcgaccgaagccaccgtcatttcaaatatacaatgtgttgtcaaggtagcatctattgaccggtctgttgggacctccagaaccagaactgtacagtcaggtagaccttctggttgggtttctccagcttgaccttgttgagccgaaccaaaatttcataccctacaccggtatcggagatactcatgagggggaatctccagccataatcgaacaaatcgagctcaaacatggaccccgattgaagactctcgatgccctgacgattttcagtacgaaagagcttatccaggtgctggcggatgtccgcttggctggaggtattaatgtgcatgtgaatgtcgccaaccgacgcagtggtctgattcgtgtgtccggcttgaccgccctggtcgatctcgaaccagatcttccagaccgtgtcgttctaagtaagtggatagacggattagtggtatagtagcaagttactgagatttgtctatcgctctttcgtccgtatatctctgtctccctcatctgtcctactcactggggaccgtactatttgctgatacaagtgcaacccgtcgatcgggatcccagcgagatagagcttgatcaactctctcgcacttacattcaccaccatatcacgattgtcttccaattccctagtgtgctggtagtgttgttcgccccagtgagaaccatcgatggtcaagatcgaggagtccacctgtccccagtcctcgatcgcgtctccttcaacggtgctgccgagcagggaagggatgtacgtttgagctgtactagcggcggactgcgagggggcatatatcgaagtcatattgaacgtgtgcggaaaggctgtctgtctatctgagtcgtctgttggggttgatcgcaacggtgcggcatatcaatcttcctacttgaatggcaaaacagattcgtgggactttatgccgttccaagcacaggagatacacggcagtcatcgagtcccacggttccgcgaaccatgtgcttcctttgtatgcttctccatcacgaaatcttagcaccaataccgagcgcccgccccgtcccagaacaacgcctcgggcggattcttcatacgaaaacgcgacatcaaacggaggagaccaagcagctcaggtgacgtcgctatgacccatacctaaagtctcgtacctcctttcatccgacgatgtctgaaagaataggtggctcgatctcgccacgaacgtatctggccgttcattccagctcgagtagacattgcgtgagctgacaagctccgcgcgactatcttcgacggccgtccacagcatgcacgacggacatacattaaatcagctgttagctgatgaagtagtggctcggacgcttcactttgattagacccgaccctaagtttttcgtcgccatgagggacccgtcgagtcgatcctggccgattgagatcgggatatcacactccggcttcggtaacccgatctcgagtagacatggaatattgtaagagctatcgattctcgcacatccatcttgtccagcgcgtcgctgtatataaaggcaagaagagtgatacccgagtcaatgcttctcgcaagcgatggctttgtatcgaaagggttgcatccgaggtaaagatgctagacggagacgagggcccttttcatgtcaaaaagcggattgaaactggcgtcagagagatacagggttgaaatgctcgatctcgtgtttcaaacattgatcacccgtctgggatttgattgatttccttcccagtgccgttgaggcacgttttttctcgtacttatcttgtctacatgatatatattcggagcgtctcgctcggagcgattccgatcgctacggtaataggtgggccatagcatcttcacgcaccaaaaatcagtggcggtctgatcatcatcgatattcgagcgattagaggagtgcggttacgatgcacgtttggagagtgaaacgcgcgaatctatctgccacatcgaagcgcgatcttgcgcctgaggactgctgtcaccttaagtctggtcgcgctaaaacgcgtgagaaatttcacctttccctcccccctgctgctaggaaaaagtcgctgcctccccaattttcagcgccacccacccacctcgaggccaacccagccacgtttgctatcgaggcgcgtaaagacggcgacggcgacgacgaccaggggagcgagagcgagagataagatttcattcagacgagcgaaagtatccgcacttaggtacttagatccgtcgaccgactctttttgtttttttcccttgtccttttttacacaagagacaagaatacacatcgatcaggcgaccgatgtctggcaaccagctttacctacccgaattcgactcgaacgttgaccgctgccgctccacgaccatcaacgacgtcgactttgggccgatggatcgcgggagaatgcgaagcgatctcctcgatatagtcgagtgtgtgggtgtgggtgggtggagggaaggaagcagatcccgaccaaccacgatcgcatgggttcaccatcgggggaagggggaacacgcgcgcggctcggtccgaccgagagatgaggggaatcgtgttgatagcgatcaggtcaaacccgatcaaaagcgccaaccccggtcgagtcggtacatccgaggacgatcagaacaatcacagagcggggacatgtcagaacataaatcgtatgagccggacaatcgcgatcaaacgacttcgagcaacgaatcgcgaacgcattcgcagctcgcagttcgtcacgttcgacgaccttgaacctcgagatcaagcgaagcccggcgattggacgattgcattatccctgcttccacccgggctccatcggctgctccatccccccatcagcatccacccctcaccaacccagccctctacctgcctgatcgctccggtattccggccctgatccctggacccagcgtcccacgcgtgtaccatcggtcacacggaatcctccgaaaggaaaacgcctctccgccgtagccgggtctatcgatcagatcaggcgtgttacgggcgaaggggggctgcagagaccatcaatcaaggttcatcagcgcccacgttggggctcgatcttcatcaagattctggcctgatcgaaagccgccgaccctcagagtgatggagcagggcagaggagaagaaaaaaacttcgacgggggttcgctcttctccgaaaaaaataacaatgcgctgatcaatcagagatcagatcaagatcagatcagatcgggattccatggatctagaggcgacgcgcgcgtgggtcaaggtagccaatcaagagaaagacatttgatcgacgaaaaaccgaaccccgttgtgatcgcatcacgtgttatcggcgaagcgcttgttcgttggcgtcccagatctcacagtggtagtatcggtagctggcgaaacggatgtcacccctttaatgatcaacactatgcagtgacatttcggattaacatgacacagtgtttgtgtgcgagcaaaaggtcgtgcgggctgtctgccacatcgctctgcagtctcagtggctcaggttcgtgtgtcccatcccatatcaataatttgttcgaccaggctcgataggtggttcaagttcggggtcgcatgtggaaacgtcgcgttattgacggcttttaattgagtactcatcatgatctattcatgtgcgtaaagactgcggtcctcaagttacaaaccgatgctacggaagattcatttcgtatctttgctaccgtcgcccggattgttgggtttatcgaccccgggctgaagtgtatcttccgattgcttcttcaagcgggcggaagcgacgaggcaacagaacgtccgatacatagaacccgtccaggcattaggttgaccccatgctcgcgcttgcgaatggatgaccatggccaatatttccttgtcctcatcgttaaggtggaagtcgcggttccaagcgtcggtcccctcataggccgaaaaggaagtcacaaatttccgcactccattctctgcaccctcgatgctcggacgctcccctgcattgaatatctggaagacttctgcgacctcgagaccatcgcgcagatcatccaagacccattaatccgcctatgaaatatcttgcgactctttggacgtttcaagtgcattttcgacagacttcgatggcacgacaggatcgtcaggtccgctggcagcgacttcattcatgaacgtgcaccaagttgtgatcaggtcgctataagtagattctgctcctggttccgtcacaaagaagctttcggctccgctaatgatgaagctgatcggtccgaacgggcatacagactgagccgacatcgcgctgtaagaatcaccgtcgatggtcttggtagaggaacgctgtgtattgccgtctccgtgccaattaagataggtatagacgaacgactgcatgagatgaatctaaatggcgggttctggggaagcctgatgtattagtactgtcgactgccaacgaatacattggccggggtaatggcgtgactaggcagccatagtaacgatacttcctttcatgttgatgacgagcgtgttcgacggattacgatatgtgaagaaccttttgctgatggcgtctcccggcagagataaagttcgatggtaccttttcgcatgacatccttttcgcctacgccaaccgcgcaatcatcatccaggatacaccaggagtctttctgcatcaagttgagcgatcaggggtcagttcctgtacggactaaaggactcaatacaccgcgatcgagagagaaacgataccatcagatagtcacgggttcatcgctcatgccggctcgacaatactctactgctgacgggacaccgatgtaaggcatggcagcgcgtgcgatattctctcattagccgaaggcttgactgtcatgacaagcaatttgcacgtatgacaataacatgcccatatccgtcgattatggtgtgacgaagaagtcaagctgtgagaataacggtcacctgataataaggaatttgatatagcttgtggcggcctgtaaggtggtgaccgagaagcatgtcgacgtagaggatgacccttgcgactcgtcgtgtgccagcttgtaaagccgcacattccaggaatccgtggtatcgtcatctgattcccaacggcttgtggtgacatgagtacatctcacggtgatcgatcccggacggctttcaccgtgtgaaatcgggcagattggctcgcaatggtagagttgcctggatgagccggtgcggcagactttccataatcaaaacgggtaagtgctgtgccactggttcttatggcaattgcagcgcactacagggacccacatatgcaaaccgctgatcccgtgactcgtgatagaagtgtcaagtacaagaaatagtgggtacaaagcaagcaaattccagtcaggtcagatcctctgaaaaccgagaaagttcatgttgggggactatcgagcgagaaagctcgtccaggcttcactcttcttctgttggcttttcttttcctttttcagttccttcggacaaatcctccacatatcgacgaatgtctcacccttcattggaggccatgttcctagatcactggctaaccagcaagcgttatgaaaccgttgggaagtaaagtccttgtcctcggtaccgatcttttcttgcagtctcctaaatccctcattaacgacgcgagaagccgcaaggtctgaaaacccttcgtggagtttcccactaatgtaacaacggaagaagttttggggccctttgtttccccattaagtaaagttggtgtacctggaattggtaagtcccatatcgttgtctgccctgtgatccaagtgttccacataacggcgactcccatctctgtaagcgttgtaattggcctcagtcgggttcttgctgtatgtctctcgtaaccttgcgaccggttcttgtagtgtcttggactgctccgcccaagatatttgctcgaatgccttcggcttctcggcggaatccttcgtggaagtgtctgaaggtgccggagtgctctgagcagtcgactgcttggactcctttgaatccttcgaatccttcgaatcatgagtgctcgatctcagctgcgagaccacggtactgttgacactggcttcaggagtgttcatagtttgtacttttcgcgtgttcctgactttgcaactgagcgagaaatttgataaactgttgcaatctctgtttaatcgcgaccaccggcctccagatggccagccattgataccgcgcgattgacagcagacgactcttcaaacagttctccattgcgtttcctttgagcatggtatcatcgagaagcagctgaagtcgacaagtcttgtgacatcgtctagtctcgccatgtcgagggcgcgcgcgagatggagaggggggatggtagcgtctccaagaagcctcaaaggatcgctagtcccggtgaaacgattgggtcacagtgtcgtttatgttggggttctccgtagtatgtgtgcatgtgatcatccgcaggtactttctcagcgtgtagggcagctgcacagccaggcggcttctctgacgtttgccttgatcatgagatggtcttatggatgtaacatatgcgccatcatgacgtgacccatgccgtgaacatcgattacgtcacttgggatgaccgaaccttgataacctcggtcatgacctgattgatcagcgatgcagcgatcaaaagaaccaggagtcgtcatccaatttcaatctcttctatccaaaacgactcgggactctcacgacctatatcaacagtgcgactacgattactcagaaactacaaccggcacttcacacgaaaacacctcaaactagaacgaaccacctgacaatgtctcaacgaatcgctgtcattttgggagctgggcctggtgcaggagccgggatcgcgcaagtacactcaactcgctcccacaaagactttgcacccagctgactgcttctcgtctgcatgtgatgatcgcagccgagccttttccaagacccacaatatcgctctcctctcccgtagttcgaacacgctctcgcaaacccaggcctccctgccctcgacggccacttcccaccccttccccgctgacgcttccgacccgggctcgctttcctcggcgtggcaggccatcaaagctcactggccggaaggcacgatcgatgtggccgtcttcaatgctcctggaggtgggtactcacgtggagggttcctcagcaagaccccggaggacctcgagcgtgggttgaaggcgggcgtgtaagtggccttaaggagctcttccgaggtgtatcgaatcggccggctaatgaaagcgaacccaacgtgctacagcttgggagccttcgccttcgcccagctcttcttgaaagaagctaaagaggggactttgatctttaccggcgccactgcttgtgaggctatcgtcctgctttctctagttgtcgacgtactgaccagacctgaacgctcgtgctagctcttcgaggcggagccaatttttccagtgagtatcacggcctatgaacaatatttcaggcggagaccgaacgtctaaacggcatgctacagctttctcgccagacaagtttgctctccgatcgctcgcccaggcaagtccactctgctcactttccaccctgaccccgcttgacctgactgaccgtatcttactcgcccgacagagcctagcccgggaattcggacccaagaacatccacgtcgcgcataccatcatcgacggtctcatcgataccgatcgggtcagatcgatggtgggtgagaccgaggacgcggatggtaggatatctccggacgagatcggcaaggcctacgtgtacttgcacgagcaggccagatcggcttggtcccacgaattggacatgaggtgggaaggcgtcgaaagtgtgggaggatatggtctcgggctaacgagttggcgttctcaactcagaccttataaggagtctttttgagcgggcgatagaaggaacggctttgtaatgagataattgcattgcaggctcgaagggtccgaggtgtcgaattgactaattaaaggccgggactgttcgttgtagctgaggccgaaatgatgagccatgaatcacaacacgctagtggatacagtcgtctatgcttggatgatacagattccgcggtcgtcttgacctggataaaagactgaatgcgagaatgtccgtatgtccgcccccaccgcgtacggttcttcatgccggatccatcgcaccttccctgtcttctttttccaccgcagccttgcgctcctcttccaacaacagtttcgaaaacttgctccttgctcgaatttggggtccataaaagaaacctacgaacggtacggccgccaacaacgccgcgaccaacccgaacagcgtcgatgcccagttcgggttcaaattctggtacattgggttggcaaacatggggaagctccctccgacgagattacggacgagggattgaccggcaagggcgctcgaggcgtagagggagtacccgtcggcgaggtagttgaaacaggcgaggtagatggtgtacaccccggccatgatgatggcgatcccgatgcatggagccacgtacgtgatgtacgagaaggctgtggacgaagtcgaggtcagatgttagggccgtggtttgagctcggagatccactcactggtccaagcgtaaatgaaacatccacaagccaaggcaattccggcgaccatggctgcgtttccaaaagataatgatcagcatgatcacgctgcaacgagtcgacgcggactcacctccataaagtctcgcctcggccccctttttcgcgactctcgtattataataatgttcctggacgaaattcaaggcgtaacccaaaagccctccgatactgtgtgtctcggaccgcttcatcagctacgattcgcgcatcgcccgcacttccaaactcacgtcaacgccaggtagaccagtccgacccgtcccgtaccgaacccgtagacgttttgaaagacgtacggaatcgactgcacgagtccgtacatgacggcccaggcgatcgagatccagagggtgaagaagatgacgatgggttcggtcgccaagaggtctaacgacgctcaccatcaattagcttcaagcggaacggcagaggattcgaaactcggatgagacacttacggatcggcctgaccaaactgacccgcatcaactcgcccagctttggtttccccacttcacccctagcgaggtatttcatcccctgatcccacccgccgacgacccgcttctcgttcccgtctccgtgttcctgctcgtgcttctccttgcgcatcttttgcgcctgtttcttgagcaacaccgccgctctcgtctctggcatgaataacgggatggccggcaggtagaccccgacgaggatgatctggatccactggatccatctccattccagcgaagggttcgcttcgacccaactaaagatgacgggcgcgaacgccgtcccgctgacggccatgagggcaaatacggccatcttgcctccccgttccgaggctggccagatgtcggccaatgaaccgccgacgagggtggatccgactgacccggcgccaccttggaggaaccggaatacgaggacgacggcgatcgaattggccctgcacacgagcggcagtgagcttacaggttgatcgaatcgcaccgaggaaacagacgtcattccagactcacttggccacggcgaaataaaacacccagtacagcaccccagcgacgacgtacaacggccgtctccccaatctatgcgagtcgcacccatccacgcccaatcagcatccttggttgtcgtcctactcgccccctctaacacgggccagccctgcactcactcttcagagaacggcgcgagtaccatggggaacactgcgaacccccaagcatacaagctcaaccccgtagccgcctgtaacctgctcgcccctaggtccctctccatactcccctctccgatggcgtacgagctagcattgagcgaggtccagaaggtgaacgtgcaggcgatagtggtgatgacgtatttcttgaaagcggggaaatgaagtggatccgagggagagtcgggcgaaaagtcgacccagacgatgggagtcgtcgtcgtgggtgaagatgtagacggggtcttgccctccgatccgatgacagccggatcgagaggaggatcatgatcgacggtataccgaaagcctcctatgtccctgtacgtcgaccttcccggcgtccgcgtcccgtccgcgggcgtcctcgtcccatcggccccgtgtccgtccatgtccaggtcgataccgccctgtcctgtctttcccgatcgtacaacaaacttgtccgtcgagggagtcgccggggaagttgtggacgaggagacgatggccgtccggtctgaagaatgacagggagagaccgtacctccttgtccttcttcctcgtcccctgctcgcgagatggacctttcgtaccgctgctcgtcttgatcgtccacgttgggggtctgtgcgaaccgtagcccgtgcggtcgatgttggattcctctactactgtccgaatcgtgcggagtcggtgatgtgccatgactccggtctgctccgcagtcgaccgtgtctttgtccttgtcgtcgactggatccccctcgacttcgataatagggtgtccccctgctctgacatcgtagtcggctacttctttttcttcctcgtccaacgtatgtcggcgttgatgatggtggtggtaattgtagtggtgatgttcgacatcgtcctccccatggtcattgtcatcgagggggcgatcgtgagcaatgccggcgatgggtggtgaagatgacgatgctgggtctctcgacattgccctcgatctcacaagcacagtgaatcacgcaaggacggctcgttggacctgcttcctctcttgatgtctatctgtggatgtggtcggtacaattggagttgtgccatacctttattgctgttggagtggttggatgagcaattcaatacgagatgactcgcgacctcgctcgttattcaattgaattccaacggaaaccgatcggggaatggtttcaagcgctaagagagaaagaaaaagccactgaaacgccccgcgtagtcgcccagtctgtggtgcgccctcgctgccgagatcccggcttcccttctcaagatgccgagatgccgacctcggcttcggagtgacaagagagtggggctgtgagtgagcggctagagacactttcggatgagaccgatgacaaatgccggcagcaaatcgattcggaagtaattcggtgacatcacgtgatctcaacttgggatcatcatgcgatcacctcaacaacctacttggcacgagatcgtcatcccacactcggaccaccctacatacgttcacacacacacattgtctatcacatcgacacaacaccgctttgaatcggatccgagccacaattcgaagcagtacagtctcgacgacgatcttgatgcctccccgtccgccatcagtaaggctgttacggctcccgctcacaaggcattccgaccatcatcaccaccccttatatcgacaacaccttcccgccggcctcgtccgaagtcgaacgtttcacgattacgtcaagggtcagaccggtacaggtgagtctttggcggtctctatcgagctggctatgggtcagatgagctggtagcgattcctaccccatgtcactcttcgtcctggatgaggaaaatgaacagaggagctccaacaccgtcgacttttcacccgttttgctgaccacgaccctcccctttgcccatcgcacaatgcacctctaccatctcaatttgccatcttcttcggctctgttgttgttcgcgcacggcaggccagacgtacaaagtagacctgaactcgaggaagatcatcgggagggtctcttcccgtggaacccgacagtaagcctccaatcgctccgtgatcgccttgtatagcaataatctgattcccaagctcggatcacaccagaggttacaatccaggacactcgctaagtagtagacgtctcaccgtttgtactgaacaagcatccgatcctagctacctatagcgacattacttccttatccgtacatcaacccggattcgtatcatcccaaccgaattcgcttacaccaaccgaactcggcttcgctcctgttgtgactacctacgatccgtaccgacattgccacttagatatccattagacgcgacttagcgaagctccgccgtaacacttgcttgcttgcttgcttgcttgcttgcttgcttgcttgcttgataccctgatccctcgcgctgtgcaagcaatattcgctttatattgtctgaatatcgatagaatctgttagatgcaacgttccgcttgccaccgcaaacgtgtcactggacgtgtagatgtgctgagctctttctgcactggtatgcactccattgacaccttgagcgggtaagacgtaatacgcatcccggtccatgctgtacagcggcagcaaggaagggtaccgtaggagataatgaacgagagaaggtggcttgagttgactgcacccggtctttttggcccgctcgcactgtacacatcttggtttccagtcatttgtagtcgctcccaactctgttgtggcgacttcgcaattgccctcaggcaaacagtttttgcaaggcgcttcagcgctggctcgaaccatccacacggcgggatctctcctgccgatgcagtagcatccttgagatcggcaattctcacagttcaacttatagcccgtcggagcccgtttcagtatacaaaccactccattgtttggacagtcatgccattcaacctcggggagatagcgagcctccactttcctgcggtcaacaaattgttttgacttcaacttcgccattgatgcacacaagctcgagactcttatgcccggccttatcaggccggtgtgcaagtacacttctgactatcggattggaagtcaaacctcgagccgactcctctgtttctggttgtacaaactgtgagtttgttgtgccctgttccgtgcccattatgagacggttgttcaaatcctgggcagtgtgtgagtccttgttactttcgaaaccattttgcgaatgagactttgcagtcatgatggccgtttcccttggcgagttcacagattgaggcttacggggttgattctctgagtataagactagatatacgtgatacgtgggatcatatagcggtagctttagcgggttccgcaatagaagctccaacaggctttctgtagtccaagtgatccgcggatcaaggggacagtggatgcatgaccgcgcccaattggtaatcgatccctgagatccgtagatatttttgacgagacaaatcctatttcttgtctgcaaggcttgcacccccaattggccttagcggtgcagaaccacgataccgatacgacggcagattcgcagtctacgaaagaacgttcgtttaaattctcacatccaacgcacgatttacgaaaccgagaattgttgcatcgctgtaacttaaagagacagggggtgcctgctttccaacacctctgacaaggttccagagcatggtaaagatgactccgctggcctgcgaggaatggacgtatcgaatctccatcgtgtattgtctcgaaacctccatctgcgaaccgtcgagctatatagttgctgcttgtcaataacgaagactgcatcgatgctggatggattgctggaagttttcatttgtattcagaagcttagagtgtctctcctacaatataagtcttgagcctatatatgatgatgacgataggagtgacggattgtcggtgctcctctatccatcgtggcgcaacgccggttcagcaactgctgcttcttcgtggtgtcccaaggctgtccgcatcagccacagttcgtaaatgcacgttcttggtgccgctgctcagctagcgtcattagcgttcttgcaggacgaagaagatacttagtggattgtcttagcgacaagcacaaaggaaggaggcatgaccgcttgatgtggttcctgttgggaggacggtccttgtgagcgactcgaggggttttcaagagggaagatgaggagcggaataataaagtcatcacgttggatccctttggcaagagaaaaaaattgtattccctgttgctcaccgtttgtctgcatcgatctagaacagatctttgtggtcctcaggtcagtcaagctccttcctttgtcaccagaccatcttgaacatgtcataatcatggacgtaaactgtcacgaggttcgcccacactctcctccgcagcgatacgccacttcgtctgattcctggaccctgtgcctgttgccgtttctgggaatcgccactggtgctctaaacattgcgcacgagccatatcacgctctactagttgagtcgatcgaaacagctgtgcccaagatccgattgagcctttcacatatgagaatgatagatcgcacaccatattcgttgtactcggccggccttgggtgataggtcacgcctgatatccggtcttttctgctcgagctatagatcacatttcaagctagcaatgggattcacgagccagtacacccttccacttgcaatgaccgaatgctcatggcatatccacgcccgcggctgtgcaaagacctggggttatgggttcggcttccatctttcggcgttgggtttgtacctataggtgacgcctttgtgggcgagactttcggctatactgtttctgtccgagggggggaatgtggagaaattaagttcaaattcggaagacatcgcactgctccctgaatctgggctaaatacgtcgtatccggtaggacctggcctgatagatgactctgaggtagttgctaaggatattactggcgcatgattctctacgccaccgcgaaggagagtcagattatcgaaataatttggcccgggactactttggatggccgaggagtccgcttcttcaggcagcgagttcacatacatcgtgtgagatcccaacgtggtagagtctgatagccaccaggtgtccgaaccactagtttctccatgggggagaagtggctgtttgatccagtacgtatcactcatttcgtcgtaaagcggcaacaaggcagggtttctctccagatactgaggcaaagtcgctcgaatgtctgtggaaaagcagggctccttggaggttttgtcgccttcctttggtatcggcccggtggcgagacaattttcacaatactgattccactggcacggagatgaccttgtcagggttgtagacgtcaagcatggtaccgttagacatttcgtacaagagcgctcagccagtgctgtacactcccataagatgggtatttcgaattgtacgcaaattcccttgtcgggggaattcggacccttgcgggtacacgcaacgcattttatgcgatatttgttcttctctgcatgtcctcgcggaaagataaaattgcaagtaagtctttcgttggaacatgtccagcaaggctttcttgctcgatactgatgtgtgcgtattccttccagaaacggtacaatttgatcgtttgcaagctctttgtagaggtcgagcgcacctagggctgccaggagctggtgatcgatatccgacagcgtcatgggttaatgtttttctgtcgtcgtctgacaaatcgaatccgacgtttaagtatgtcttgcatgactttggattcgtgttgaggcgataacggaatgcagctcatgtattgtcgttcaaatcctgtagtttaccttctccatatgagtcgcttctttgggggtcggcaacccttgtcaacctgaaacgcaaattacagatatggacacatgacgaattaaaatgaatattcgtttttccttcgatcgacttggctggttcaacggttcgattgcgtcagcgcgagcggtcattccaacccttccagtggctcagtagatcagtagtggatcatgttggcctgcaactcgatcaacatactggcagtctgacagcaggcgttacaaatcagaaatctagcacagcttgaaaatatgtcagccagcagtgaaagtaggtctcgtgcggtcgtgaagtgagccatggtcagctgacagctcacatgacctacctttgtccgcgcagatgttgcgtctttcatggcgattaccggtacgtccgatgccgacgccaggaaatatctgagcaggtatccggatgtccaggtgcgaacatctccgcaacacaattaccatgatccaatgatgagctgacccagggcccgaatcgcagggagccgtctccatgttctttgctgaacaagccggcgaagcacccgaagatatggacgaggagcaggacgaacgggatcctctcgtcaacgccgctccctccggcacttctacgccttctcaatctgctggagcttacactctgagcggacagcctgtaggagccttgcctaccggatggggtgccggagggtcgtcgagcgggccgaacatcggaagggtcggtcagagcagctcgggagccgccaagaagagcaagaggtgagcgagcagaagggcaatggccgtgggaatacaaggtctaaaggaaagcttcggtaacactcgtgacagcaattccaaatttgctaccttgggcagtatcggggtgagtgacttcatagcttgagcaatgaactacaacggctgacgacttgcctcgtccgacagaactcggcggccaactctgatgacgaagatgagatcaagaagcaagcagagctttatgctggaggacaaggcggaaggtaagaaggtagccattgtcagtgatttgagcatagttaacgatttgcaatctgtctttagtggaatggccattcagggacccgatggacccggtgggagggtcgttccaggacaagacgtcgttcaggacattctgaagcgcgctcgggagtaggtcacaaacagatcggctgatctacagcttctattggttgactcatcgacctggtgtttttttagtggcggtgcagccgcactcgaagctctgaaaggatccaacagccaaaagtcgagctttttcggtggaggcggtatgacgctcggatcggacgaagcaccttccgtctccgtccccgacccgtcctcccgtccctctggctcgagacccgcgcccgccaatcgacctcgcggcttgatggcttcgcttgggttcggcagtgcatcggcagaggattcggacgaagaggaagaggtcgacgacgaggacgttcaggtccggaacttgaccttctggaaggaaggatacagcatcgaggatgggccgttgatgaggtacgatgatccccacaacaaggaggtcttggaggctatcaaggctgggtgagcatccgcgcgcgaactactctttacgttaggattcagctcacaaaccgtgacaatggtacgcagacgggcaccgttgtcattgctcaacgtcaagcagggacagcaagtcgagctccgagttgctcagcgcatgaccgaggactatcagaaaccccctccaaggcccaagcaggcttttgagggatccggtcaaaggctcggcgctccggctcctcaggtggtccaaggatcgaccatggcggccgtgggcaacttgcccggaagtttcgcctcggctgcgagcggtgcgagtgcacgaaatgtccagcctacgttcgaggtcgaccagagcaagcccgtcactacggtgcagatcagattggctgatggagccaagtgagtctcgccttgtctttttcgtggttgcgcctcgattgacatcctgtcgacgtccaggcaaagcgtcaagctcaatttaactcacactgtcggcgacctacgagggatcgtgtctgcgtaagtcataacgatctgggcacgataaggggggtccgtgactaatcctgtcgttgccctcgcagcgcccagacggacgggcgatcgttcgtcttgcagactacgttccctacgaaagtcctcgaggacgactcgcagaccatcgaggccgccggtctcaagaacgccgtcgtggttcagcgttggacttgatgatgatttcctaacgaatagtttctccgcctgttgaataggctttgatgcgacgttgtttcatgaccaagatctgaatgtctacaacacaacgccaagcggctctaagccgttcccactttccgatgtacaaaagcccacagatctcgtcatgataaaatagcgaaaagacaaaaactggttgatggatcaagaagaccttgcttggcgtttggccgtcccgatagtcgtgctgttgacctgtgggtgcatccagacaggtttttagcgaagtagttgacccgctgccagactttatcacacaccttggtagcgaatcgcaagctgttcagggtctcgttggtgtgggctgccattggagacaagttgcagaacattagtgttttgctgtggcctattgagtagcaagacaagtgacatgagcgttgcttctcgagtgagtatgtaacattcgctcgacgacacttacccgacaacgagtacatgagcaggttggtcaaagtgctgtcccggtagccgacgtgcgccttgtcgttggtgctcttctccgagagcttttgaatgacgttttgcaagctcgacaacgacttgttgatgttgatcgtctccttcatgcggtctttgtgttctcccgtacccgccttgtccaatcgctcggaaccagccaagtcgaccaagttcaagactccctgtagcgcgaagatcagccaggtcgggacgagggagatgcctgattgaaagactcacctcgcaactctcgcccgtgagcgggttgtcgcccttgacgcgcaacgagaataccgagtgggatcgggacgagcgctcgttcatgttcgtagctgcgactgatcgcaagttgctggcgcgggccaagagcgagtggacctggtcaggcgtttcgaggcgaactggacgagaacgccatgtcctttagtcaggcgttgcttgcccccgtcatcaacgtcccctcgcactcactaggattgattcctgtcacgtttgtggttccctttttctcgtcgtgctcgatcttgtgttcggtatgatcgttggcggttccgaacaggttgttgatctgggcgagaggcagcggcaaggaaatgggcggctgttggaccccaggcgacacacgggcgcgacgctcaccttttcgttgtaaatctcgacaaactgtccgtacatctggtacctccatcctcgatccttgagagcttcggtctcggtaaagatcatgtgaatcgcacgggggatcattcctgccgtgtcggccgtctagttccggggtggaaacgaacaaagaatgagctcgcgggtcttgctgtcaagcgtttcggcgagcccgacctaccttgccgccctccatggtccaagatttcccactacccgtctgtccataggcaaagatacaaacctatcgcatttaatggctcgatcagcatcgaactactgcgagctcctgtatgcatcgaacccgacgcctacattataaccgtccaaaacgctctgggccaacatggagatttcttcaaacacctcgtgttgcccatcgttgggttgaaacaccttgtcaaacgagaacggcaccgtctcctttctcgtcgacccgatggcgctatccctcgacttggcgatggtgagctgttgttgtccggacgaggtgagttgacccttttgagcgaattcgatctcggcgagggcgtcctcggcgtcggcttcggaaccgatggccggtcgaacccgagcgaaaacgcggatattgcccttgagctcttggacctggttgtgtaatttcctcctgatcgtctcggccgcccggagttcgtcttgaatctccttgacccgctcgtcggcctcggccactttggatttcatctcggcgaccgaggacgcctgccgttcagtgtcgagctgtaacgaccggttctgttcgcgtagggaagcgagctcggccgtcatcgtgatctgggccgtggcctgtgcgttcaaggccgccttgacgtccctgacctgtcctctagcctcttccagatccgcacgacaagcccggagatcatcctcgaggtcccgtcgttccctctcccgcttggccaactgacgttcgacgtcgtccatctcgccgcggtgtttctcgcgtagggcggcaatctcctcgcccgcggtcgagaggtttcgacgggcttcccgttcagtgttctgggtcgcttggagtagagtctgtaggtcggcttgggacgaatgtatgagcgagactggtggtcatcaggcgtaaagaggtgatgattagcgttccagttggatttccaagctcaggcttgggctcgctagaagcacatactcttttcgcgcctggtggttcgaggttcgatcgaaggaaaaacaaggatgagcatacgcctgtgcattccccatgcgtcgggaattctccgatctttgactcgcatcgcagacgtactcgatctgcatcatctccatcatgtccttcatggatttttctacactatcgatcctccccgtctggtactaaaaggccgtccagtcagccccccctcgccagctggtacacctgtagggaagtcccctccccccaactacgacgactcacttgttcctgcatcggcacgacttccctcgtctgcctgttccctgctcgtccgacgactcccgagccagccgaagtggaagccaacctcctcgctgtacccgtgttcgtactgacgccgagattgcgtcccgtcatggaagaagacggacctcccacggtcactcggaggttggaggacgaggccgtgcgggtgcggttcaacccggggttgttggtcgtcatcgaggtggtactggtggatgtcgaggtcgaggtcgaggtcgaggcgttgaggggtcttcgaccggcgagggtggacgtcgacgaggcaggtcgggtagaggtcgaggtcgaggcggagagcggacgacgtgtggtagtacctgtgctagtcgctgttgctgttgcggctcgggaggtggggacgaaccctgtcgagctgcccggtcgggtcgtacccgtcatgaccctcttgttgctcactagcgtcgacgacggacccgaacggaccggttgtctgacccccgtcatcgtctgcttctcctgggatcgatcctgtgttccttgactttgatccgcttcttgatcatcagaggggggtcctttccgtttcctcccggcgttggtggatacgggtggtacgagttgcccgttctccttgtccaccgggtcgtctgccccgtcgacgtcgatatcacgtacacccatcaacttgggtttcgagctgggagaaaacgcatcgatgatgggtttcaagggggatgagaggaatcgagggagtttcgagctcgtcggtgcgggaatcccagagtggaacggtgccgtcatcgtcgtcgtcgtcgtcgagggtgaaccgggagggagggtgttcatatcggcggattgaagtgggaggttcgatgacgtccccgtcagtgacattgagagaagagagaggtggtctcgtcgtcgtttgtcgttcgtcgttgttgtcgtcgtctgtttgataatggttcgagtgaggatgaatcggtgatgatgcttgatggatttgttgttgattgacagttctacgttgtcgtctacgagatatctcctgtttgttgacattcaggaattggatcacaacctgttatcaaaataaacaatgacagtgatgatctctggagagatcatcactgtcattgtttattttgataacaggttgtgatccaattcctgaatgtcaacaaacaggagatatctcgtagacgacaacctcccccgcgttccggatccgtttcagctctcaaagtgtgttcagcccggatcgcgataccgacctcggctgcagttcccgaccatctcctttcgggaagccatcctttcatccagctcgtgcagcattgaataggaatcacaaactgttcaaaggaaatcgacctacacgcgaggcatcctttcagcgacgtcgaacaagcttcgaagatacacgccgggactgctagactcgatcgctgataggtttcgcttgaccgtttggcgacattattgctcggaattccgcacggcgcaatcgattcggactggatatacctgggccactcgtcaggagatcgtcactagacagcacatttgcgcctgttcaccacctgagaaacgagcgaaaccgctagacgctatacccctcgatacccgcccacgcaccattttgacgcttcaccaaaccgtcactcgagcagataccacggccgccatgtcctctcacaccgccgattcgacggcgaccaactcgaccgaggtctcgcccgccttttaccggttcgaggatcccaagatcgacgggcaactcactccgttgaccagcgccttcaattcgcccgtcaacgagaaggaaatcaagcctgttcgtggcgttgcggccttggctgctgtcgacctcgtggaagagcaagaagaggctgaagaaaccttgaccgagctcgaggctttgcaagctcgggtaagggagagttgcgaaggcaggtctcagacggtcgaggcatggggtcatcgaggagcgagcgctacttggcgtgagtgtcgcactctttacaggacatcaacgtgaaatttatatagctgatctgctttctgcgcgacgttgttctgagtagctgagaacacgatggcctccttccgagcgacatgtcaagctggagctcaggggatcgagaccggtaagcgccatcataacgatacgcattgtgagacataaccctaaatgttctcatcatttcgccagatattcacattaccaaggacgacgtcctggtcatgtttcatgaccccgaattgagcggcaagacgacgggtaaggggaagatccacgaaactccgtgggcgggggtgttagagtgagtcgcacactatacatggatatcgcgccattcaagacctcgagcttacgacttgtcgatggtatttcaggcacgtccggaccaaagctcaacctgcacaacctttgcccaagttgagcgaggtcttggccatgcttatggaacctgacaacattcacgtcaaactcaacgtgagcctaccggtcagcgtttgcgagactgcgcttgattgacagatggcgcctatcaaaaccctcagatcgactgtaaagtggagaatctgccggaaaagctgttccctatgatcaaggcggagatgttcaagtttgaacattgggaaaccctgttggcgcccagaataatcttggggatctggcatgtgagtttcgaaaggactagatctttgattctgctcacggataggcgactgatcatacacctatatatgcagcccaagttcatcgctcccgccaaacgtcacctccccttcattcccctctatgccatctgcatgtcggtcgccaccgttcgagccttcttcttcgagcactgcgtcggcttttcgatctgtttcccggcactttactcggccgatggcaagagatttcgagacgaagctcgggcggccggtaaaaagctgacggtatggacggtgaatgatcgaagcgaaatgttggagtgcgtgcgatggggagtcagggctgtcattaccgatgtgccccgcagcatggtgacattgcaggaacaggtccgtcaccatctctgcctctgtgtagattccatcgttaacggctcggttccatagatccagcgagacccgacgacgctattgacgccctactttcaacgcgtcttgatgccctggacgtctccacgatattatgcctacaaatacgtaggtcgaccgggatccctatacctgtcgcggtccatactgactgcgtcctgcgctaccctagaatgccgaggcagatcacgaaatggattacctcgaaaaagaagggggcaaattcttcaccgttcaggatgtcattgccatctagacgtacgagactcatgagaggaggtatctagatagctagacacggacaatagcacaagagtgtgagatagacaaagaaactcagaatcccatcgcagagccaacaaaccccgtgtaaatagaaacctgctctgtccgtttgtaccccttggcctgtagattgccagatcgcgttcctcttcagctttagatgtttatgatatgggatagttggtgaccgattacaacgaatggatattacgcattgaattccacatgatacattgggcaacatgatgtgtacctgcgaaggcggagcctcaatcgctatccgacccggagccgtatgcgagggcgaggcctttggtgacttgggcagatgccgttctcgaaggccgagggatagtctggtcgaatggtgtcatagatggcggggaatcggaagacgatgtaacgagtgtctctctagatgcggcgggggcgttgtcggatgcgggaccttgtgaggaaggttctgcgggtccgttccggtcggcaggtccgctgggcggaaggtcgtcccggtcggcggcggtggttacttccacttgtgatacgtcctgccggagattcgatactctctgtccttcgttctctcggtctggtcctcctcttgctgtccctcttcctcggtccttacgtccactttgcctgccttcgtcgtcatacggtgaaccacccggtcgtccctgcccgggtttccctccacgccctcgtccccgtcctcgccctccatcctgttgacccctaccccgccctcgacctcgaccgcgacctctatcatctgtgcctcgcatcgctgcggtaatcctggcgtcctcgacgatgcccgtcttgtcgaggcccttgtccacaatctccttgccccacccttcaacccgtcgccttccttcctccaaccacttgtaatcgtccatcatcgctccatatccgtaatctttcaatgcgatcttcttcgtcttgtctctctcgccagtgcaccctgtctcggccttgtgcgccttggaacaggcaagagagcaagtaggcacggtgcatcggggacatttgtatttcgatggttgcgtgttgcattgagcgcagagtggggccgctgaaggaccggcgatgggaggagtcggtaattccatggcaacggagtgtggcaggatggtctagagggaggccaagaaggaggccaaatgatcgaatcaaggagtcttatagaaagaaggcagtcaatgacaagtttccatcaaaagctcaagagttgatatgacgaagggcgatgattttggtttttactcccggacttttgcatccggtatttagtttgcatccgtctattgtggattagcatccgatcaactccggcatcttcgggcatctgctatcacccgttcgtcctggtcgcacatgatccatgatccattctatcctattcgtttctatcgtcctgtacattgcatccttgccatcgagacttagcactcatcgccgctgtagattcgtatcgcacgtataccatcttctactttcctccaagtccatccgatcatttacgaacatggtacaaggtatcgaaaccgccgagctcaagaagctcttgaacgctagcatcgaaggtgagcccaggatggagatcatgccgtccttttgggtagttcatcatgacctaccatacagccaaggaagcagcctacgctccctactccaacttccggtaggtccccaccgtgagtgtaaagacccgacatccatcgctaacgtctgctcgatctacagcgttggcgcggcactgctctgtgatgacggcactctgatcaagggatgcaatgtcgagaatgccagttacggtcagtcctttggagagattctattcgtaaccccgagcctgattcgagctacgacttcggcaaccttacaggagctgggatctgtgccgagcgtactgccctcgtctctgccgtggtcagtcgcttcgtgcaggcggattacatggctcgctgacgcatcctacgacatgcattgccctttttgcagagccaaggaaggaaggatttccgagctatcgccgtatccaggtcagtgtgcgccgtttccatcttgagcgattcgaccatgctcatcaagcgctgtcgatcttacagcgacgtcccttcgccttcggtatctccttgcggaatctgccgtcaattcatccgcgaattctgcgccctttccaccccgatctacatggtcgggtccaactacgccaacgatgacaagtccgatcccgtagatgacggggagacgatggtcgtcaagacactcgaggagttgttgccgatgagctttgggcccgagttcctaggcaagaagaagatctaggtagttgcggcgagcttgtggacacgctggacggctgatgaaaggggttgaagggtccgaagggaattgtacgtcgtatactatcgtaatatgcataaggaagaccaatgctatcatgtgaattccattcaaggtcgacgtagcatctagctactgtcgttcatcgtagtccgaggtagtgctcgagacgacccattcctcaagcccgctttttgcccttgactctcctttcctgctctacaacggcgcttcttaacctggaagccatgtccagcatcatcccgaacgggatcaggaagaatgggatgtaggtcgcgaggccaaaggcgagttggaacgaagtcggtcggggcagagaagggggaggggagacgatgtgctgcaggcacgggaggagggtcgtgcagaccgatgccgaatagatcaggaggagagctatgggaacgagggttcagtctgggtcgggataacgtctcggtcggtggattctcaagcgttcaatcaagctcacggtagatgcttttgatatctgcaaacgcggcaaaaagcggtctcagtatagccgatgagcagcctttccgtattatagggaactgactgtagtacaggcaccaagccccggcgaagaacagtggcaactgaaagaaaacttcgaggcataggctgttcccccggcagaacaagaagcccgtcgtggggttgtggccagttgacgatcagctcatgacccgcctggatcacttcgacacaacccaaagtcggtcccactcacaagcccttgaaccagaataaactgggatcgccgcgttccataccgagcatcaaggcatccttgctaaattcgagcgcttgcaggtaaagcgagcggatgaaggttgggacgaggtgtttcgggtagatcgcttggccatcgatcagggcggtcaatggctgtgaaggtagatccggcaaggaagaagagccgcaggagatcgcggtctcaggagcgatagtctaatctagtgagatctgaagcacgcacgatatgaatctgagagtcaccgatcagcacgagaataagcacaaaagttggcaaatagtctgacacgagagtcaagccgactcacgacgaaccacaggaaccagagcttgtccagcggacgggaggagaggggaacacgagacatggtaaggagagccggtcgtccacagaaaggtgattctgcaatgctattgacgcctgacgtcgtctcggtctgatgtaaggatggattcaaggtcattggaatcgaatgactctcgtagctagctctctcgttttgattgttgacgatatgatggatggatggatttggttccggtgacaagctggggctggaagcgcgtgggagggagagggttgagtttcggaatcaaattcaagttccgaagatagctaaactacaggataaagtcgaagggacaataaagcaacaagcaactcgacaaacaacgtgtctagccaagtttctagtaaacgactcgtcaatcatagacattcatcaccgcatctctgagtctattgagaagcgacgtcaacttgcgtggcaatgtcccgcttagcctcgctgtccacctccttcccaagcccaacatcgtcgccaatcctcatcgacaccgcgtttctctttctcatccaggcgggctactacctgctctcccgtcggttcctcttgcatgcgctaccgacgctcaggcagatctcgaagagagagtctgaagatggggatgaatctgccgaggtgaatgaatctgggattctcggtctgccaggattgagcggtagctcgagggatgacgacgaggatggcgtgatcaacgcttccggaggtctctcggataccggctcggcgcatggagccggcggatctcgtcgaacaaatccttcgaacctctatcctcccggacaggacacctcgcggtctcatatggcagggacagatgatctggacgattccgataccgactcgctcatctcgtacgctgccggttccccatcccctggcatctcgaaccgagcctcgatggatggctatcctctgcttcccctgcatggacaagcacaatcttccattggaggtcaacaatcatctcacctccgccccgggtcgatcgtcacggacccgaaccttctgaacaagaagctcctcgccaaagaagtctccatccgctcaccttcttcctcgaacgcgacgaccgggccgaacagcaggcgtgggtcagagccaaggagaaaggtgttgaagcttttccacgggaggtcgaggctcaatcgggcgccagctgatggagagcggatacgaacgacccgagggttgggttggctggccaggtgattagcgggtcgatcccaccacagaggtatcaaaggaagtgactgacataaaggtcggctcttcggtagaaacctgttttcgctgtgcttttccgagtgtctcttactgctcacgctcgtcatgtttcactcgatcgggatcttgcattctcggtgagttacacggaatagacggctaaccccgttgaaccaaccgtggctgaaacgctttcacctgctacagatcaagacgtgtccacttttcgttctcgctgcatgtcctgctgctcctgatcttgtttgtagtaccgctcgttcaatgcctacagctgacgtatcgatcgagaggtaagcgagtgttggccgtttcgatccgcatggaagagagctgaccctcgtttgcgacaccagattcagggcacacgggtacacctacaacaacgacctcttcgcgtcgattgacggtcggaaagagactgcttctgtcgatgatccctttcgggatatacgtctttgcgttcactcggatcccgccttatgtgacgaccgatcatactagtacgatccccctgatgtcgcttcacaacgagacgatggcgacgaacgcaacgaggataggcggcaagacgacgtacaagatttcgctacctgcgcacgtacacctcggggactacaatgacctggacgagcaggagactgaccagacggtcgaggtggtagagtttgagggggatggggtgcaggaagattggcaacgtggcggatggctcgagccgagtctcgggagggtagtcgtctgcgggatcatcatcatgggcgctttgagcgggttcggagccgtcaggacggcttggggcttttacgagaatgggggtctgaagagcgggtgagtttggaaagacgtgcattggtcttgacgaggtccgctgacgttccattgtggactggctcagacgaccggtatcccgcgaagatatcatcgctgctgagcgatcattgtatcgggtccggcacgacatcatgtccacacgcgagctgctcggccaatctgtcccgctggacgatccgggcgcatcgactcggccttcgatgacgaggtccgcgagcggttggctcgacattttcggatcatcgaggtcggccgcagggccaggagcacattcggtacgacgagagctgcaggggttggaattgatggagggtcaggtgaagcgatcgttggaagccatgaaattgagacgggtgagtgtctgacatcgtgcttcgtaaccccatactgaagcttatttctaccgacccttgcgaccgacagaaacgtcaacgatttgcccagacgttgcgtggcaaggtttacaatctgatcggcctagtgtttgccttttactgtatcgcccgcgtgttgatggtacgtgcaagatctggctgatcaagtgacgctgggaccccttactgacaaacgtcactaccgttctcttcagtgctcgacgtcggtattcttcccgccgctggccacgagtcacatttcgcagcacgcatcctcgaaacccggtgcggctctggccgacgagtctcttcctcaggatggcaaggggaacacgaacggcgattggatctcctacttgatcgcgttggcgttgagtcaacttccgacgggcgtggtcgacgtcaagatgtggagccgggcgatctcgttgttattgacgggtctcttgatcctggcctcgttggcccaggtgttacggagcgtggcgaggatccttaggttgacgagcaagagcatcggtgccggattcttgttgctcgggttgagccagttgatggtgagccaacggagtaccgatcggcatatatgacccggacctgatatcccgcttcctcaccctctgctccgtcagtcgacatatgtcatctcgttgctcatccagatgaggtcatacatccccccagcgacgctgaacgaccctgagctctgggcgaaccctctaaactcgacctacgctctcgggacagacccgtacaccggcgggtctatgacgagcaacatcacgctcgggacgacgacgacgagtagtatggggccggggacgatgaccggtctccccgtcaaggatccttcactactagcgaccttgccggatttccgagtgtttggacggttattcgacgtcatgttcgtcctcgcggcgttgtgtacgggggtgtggcggtacgtgggtaacaagctgaacgggccggacgagtttgggacggtgtatcatcattagatggggggtggggggccggttcacgtgtcaagatggcgagaagaaaaacgaatttacagcatagagaggaggcatatccggtgtacgatcagacaattttttgccgggggggggggtggagggtttattgtaaacgaaaccgggtgtacggtatgagacgcgaacgcgagtgccgatcaggtgatctcatataccgggaaacatttggaaaggagggcaaagaggtcgacaggtcgtcatgttcctgtttcgttagaatacgtaagtgtctcacatgtgactgaccgagactgtgattctcggtcgggctgaggggggtttgcgtgaaacgaggggaatcaaatgagggaaaaggtcgttattatggaaagtccgggttcggagcggcaatcgactcggggcgggcggcaacgacgagagggaaatacaggggcggagcggaggatttcatggcttgtggatggggtttgatgtttcggacgtgatcggtcctcgggccttggacgtacgggtggcacggcgggcgatgaattttcgatcgatcataaatcgatcaatggcgtgcggcactagctagctccctggagcggcggggggttagagaggtcctcggtcaacggatcgctttctcacgagccccccgtagtggtgggtgggtgatatgggggggagtaggggatgattcttccttgacgggccgggtgctagatctataagcctggatgataccgacaatccccggtcccacgttatttcccctcccagcccggactggaggcgagaaccgattcccgggcccggacgataggttcgggaagagctgtcccagttaccgtcgtccgtattcgataccatcgacacggaaggacgccccgacctaacctgacctgagactagacggccctcgaagcttcgatggccagtcgtaattcaacatcctcgctctcctcgccaatggtcatcatgctcctctcatccggccccgaacccgaactcggaccggaagccatcgcggtggtccgtcgagaggggtcgatagtggtgtgaccggtagataagaggctagggtccgtcgtcgtgggcaagggagcaccgtgcgaggacgacgtgccgcgttcggccgtcactgcgggttaaggacgagaagagcatcagcgtgctatcgtctctcgagagcgacatggccgatcgcgctcgatgtgcgggattgccccggtaaaccacgtccaccccggcatcgtcgtccgacctctgccctcgatccaggcggcgccccgagcagactcaccccatggtcttcgatccagtggacactgttccttgctactctccgtgttcagccatttcaacaggcaatgcatgtgaaagacgtgcgtgcattggccccacactatgagtaagaggcgaagcaaaggtgacaatgacgagcgggtagaacgaggaggatcagctcgcggactaggaggggcagacctgatgtgggaatgtacgtccgagtcggaatgaaaaatatcactcactcagtggacaatcgtctcccgggactttacaagccggacaactgctctcgaattccagctgacagatcccgcacacctcgtcctcttcgtcatcgtcgtcttcgtcttcctcgtcttcctcgtcgtcgtcgtcgagttcgctgtcgtccgagagatccgatccgtctcgacctctaggatgagattcggaaggaggttgaagatcccatcgccaggaagcgacagcgtggtatttatgataggtaatcttcatcgtcgtgcgaaaaatctccgagggtttcgttgtgcgccttgatcgacgaacgtctgctcgtccggtcagtgtccgtatttccggggcgactttttggcgttgccggcgagccccgggggttgtagtctgaatagatctccacggatcagatctccgagttcgaggtcagaggagcccgaacttcgtccgttacaccggtctcgcttctgctactggtgaagctacctcgtgtcgttggtcctatctgacagtcgatcaagaggtcagtgagcttgtacgtctttcgtgtgcatgagtgaaacccacaagatggctgtagggagcgtatgctgatggtttgcgttcccgaaatcgtggtccgtgtggtcgtggtcgtgatcaggcgtgcagtgtccgaaagaaaagcccgatcgtgtcgatcactgcgacgtcttggaggatgatggtcgtgaaaggtcgtacgaatcgtcgtgagaggtcagaagaggtatccgctgtgagcagcctgatcgaggtccttgctgatctttgataagtaggaggaggagtacgttgcggagatgatgagatgaagtaaatggatatatggtgtttgttgttgttgggtcaacctcgagcgcgctaaagattcgacccaagcagagaagtgacgaatttatcaagaaagaggcatatgcacatacatactctaatgcaacaatcacacgatcatctcacggtccagcatcgtggtcgaactgggcgttggcagctggaatctatgagagtagcatcctgacggagcttccaacatccgcccctacaacaacgcaacgacaccgtctctctggaccaacatgttctcccctttgggcttattctcgggcgtcccctgccccgacgccctttgcaaacgacgtccctgcctcttctcacatgaccccaacgtccggacagaaaagataggcggggacgaaccgacaggccagacggtcgcacgattgctagccaggccgacgggatggaaaccaccgccccaacggcccatcgcgctctcgactccaacgccgtatacgtcgagcccagcctcgagctcgaggtcgatgatgggtcctacagctgcaacgtcgaccgccggaccatcacggacgtcgctttcgggactcagtatcaaggtccccgtcctccagatcaactcgagactctcccgccaacccgctatggatcggcggaaaggcctcgaacggctatttgaagagtacaaacggatctacaccaagatcctccctctgcacctagatctagccgcggatcacgcgttggcagaagagatggccgtatcgttcggtaccaccgtggcttcctactcgagtgccatacgctccgcctgcatgtccatccgatcgagagacccgccgggatcgacgagctcgaggttctgcgggacgatcgccgaggtaaagaccaggacgagaaagtgggaagaggatcagaaatcaaagttgacgcgggacaaggtcaagcgctatctcatgactcgggaacagatggacatgtttgggtacatctacgcttgtcctcccggccaggggagtacgcacaccacgtgtctcggggagaggaagatgtgtgatcggtgcgggacagatttcaccgtccggggtccagaggaacagcgatgggaccctcacccgccgtgcgtgtatcactggggaaaagcgacgatggagcggatcgatggggttcggatgcagcgttggagttgttgtggttcggacaggaccttgaacgaacctggatgcgccatcgccgagtttcacgtcttcaaagacggcaagagttggaagttttcggataggcgcggggtcacggacttgcaggccgaagcgagggaaaaagaggacgagaatatcatcctacattccagacaggcatttatgagcacgatgaaggtgctgagggaaattcgggaggaagatcagagtacggggaataaacggaaacgacgggaagaaccacacgaggtcgtcgcaatggattgcgaaatgatctgtaagcaaaggcgtctagtctccgttagcgtccatatcttgtatcctgctcacaatggctcgctgcgtgccggtcagatacgtcgagcggcatgtcgctcgcgagagtgagtgtattggatgccaagggggatacgatcctggacgaattcgtcaaacagacggctacgatactgttcgtcgcgagtgacctctctagtcgtggatgttcctcgctaattttgcggcggcggtcacctcttagggatgtgaatgagaaattttccggtctgactatgggggaaatgacgagcgcgacgaaagatctgcctgcagtaaggcgggaaatgtgtcgcctgatcgacgaggaaaccatcatcattgggcacgggtacgtcactgactcggcgcgaatacacacgccatcaggcatttgctcatgaccctgtcaatcgtgggatagattggaaaacgacctgaaatccctgcgactgattcatcgacaggtcatcgatacggcagtgatgttccctcatcccaaagggcctccatttcgacgcgcgctcaaagatctgtcagttgcactttacggtctggcggtcgggaaattcatctgatcatctgaactctttgtttgcaccccgcgacagcacgagcgaaaagctcggcgtctttatccaaaacaatatcctagaagaaggtcacgatagcggcgccgacgcgcgtgcggcgctcgacctggtcaagtggaaagtcagaaaggatagtgctgcaccgggagactttagctatgcgtgaggacttccatcgctgtacataaatacgcgaagtttacgcgattatacaagaagttgttgggagcagggctgagctctggctcccctccgctagatctcgcccaacttcatcgcccgacgctcggcattgacctttgccttgaagtcttgcaagattggttgaggatcgaacgagtccgtctttttcccaaagcgcattccgatctgtttcagtttctgaggcgcttctgcgaccgatagcgtcaaaccactgggtcccaagggcatgaccgcatggatcgatcggagtgaaaaattctgttcaaagtgcgaatcagcatcgcctcgggaaacgacggacaatcgccttgaaagacgactcacctggtagacctgaccggaaggatctacgcgcatcaacaacctcctcatcggttgactctccgcctgtccttccttcttgttctctcgtttgagtttgaccttgcacacgcgccaatctgtccagacctttttgccatcttcgttggtcgtcagtgtcccgatctgagccttgttctcccacaatgtctcttcgtcttcttcaccctgacccgtcgtcaaattgttcgtggccgccggggtctcgccactctcgtctgaggcgtctacggccgggggaccggcggatgcagacacagacgttgaactcccgctagctgcaacaggggcaccaaacgagaacggggacggtttgctgacagcacccgcatcgctagccgcagctggggcgccaaagctgaagggtgaggccggtttggcgtttgaaccgtctgtcgaatcggtgggcttgccaaaggcgaacccggacgcaggcggagcgccaaacgagaatgcaggcttggaaaccgccgacgtctcacccgcggccgaggtcgaagcctgagagtcggtctttccaaaggagaacccggccgaactctgcctgttcttggctgggctgaaaccaaatgcggaagatccgctcgctgcgggggcggcgagttcagatgtggaagccggggcggcgcttgtcgatccgctcgatcccatgttgaacccgctgttactcgccttgaagatgaaaggcaccgggttggacccactcgccgggggagggatgaccatcgaggtcgaatcgccagcgacggattttctcacttcgggcttgatcgcgaaaatggccgaggatcttttgttcaagctcggagccgtgggcgaggccgtaggggtggtcgagccaaagttgaaagtaggaggtttcgaagccggggtggcaggggtctgatccgcttgttcggtggcgggttcgtccagcatgccttgcaccagcgcagccgcggccgtcgtcgcctgaggtttcgcctgctcggcgggcttgaagacgaacggcgaaggtgccggtgtccgttcagtagcgggcttggacccgaccccgatcgtcttgcctccaaagctgaacccggtgacaggctcggccggcttgaaccctcctattgctggggaggcggacaaagcggaaggtgcgggcaaggtgaacgctccggccttgggaggttccacagtggtgctcgatgcggccggtgctaccttgacagcctgcgcagccaaagtcttgtccaccgccttgctggaatccacatccatcctcgactcgcccgcttgactctcgaccttgtcctcgtcgaccggtttcccagcttccttcttgatctccctcaagtacaccttgtactcgttcctcatccggtccagggcctctcctaggtcgacgaacgcgtcctgcttcaagaccacctcgagcgcacggatgacggacgtattgagccctcgaatcgaggtcaaatatttctcgtccgtatcggcttgaccctgctcggcggttttcaaggcgacggctggtgtaggcgtaggctctgcgggaatggacacgggcgtggaactggatgcagaaggcgccggagcagtgctgttaaacgtgaatccgccagcgaaagcggtctgagccggaacggcgggagacgccgctgctgccgaggtcgaggtcgggttcgaggtcgacggcgatgcagccgcggaagctttaggagctccgaaagagaatcccgaaaagggggatggtttttgagagacatctgccttgggaacggaaggagccggagctggtactgacgccggcgctgtcgttgccgctgagggcgcgggtgcaggtgtgccgaagctgaatccgccgaacggagatttcacagctcctgtagctggggccgccgtttcagaagatgcagtcttgggcacactgaaagggctggcaggagaggaagaagaaggagcaacggcaccgagattgaataggttggtcggtttggcttgggttgtcgctgtaggaaaggctgaggtggccgaggttgcagggagagcgccaaaggagaaggacgatgtgtttgcagcatttcctgcagcaccagctgaaggtggagttccgaacgaaaaactcggagccgtaggtgtctatacgaggtcataccgatcagcgggccatgatcgtgaatacgatgaccgagaacgaactcgatcgactcacggtcccgaccgaactcgatccaaaggcagacgaatccgtactcgtcgtcgaggtcgtagccgtcagaggtgcttttcgcttaggtagtcctcggatcctgtcatcgaaggagattagtatagttcagagcgcagctccgatgtggagacgtccagactgacctccttccagccagagcttcttgagacgcatctcttctgatttcctccgcctttacgtccgaaaggttcggttcagcatatcaatggtcagtcgtgcttcaaaaggtcgacgtccaggagccggattcgagcggtctcacctcgtcgccgtccgaatctctccctcgcgagctgtcgacgtcgtccttggtcaactgatcttctgctcctcgtttcgccatcctgtatggtatcttttcaagaagaataggactagctactaaataaaactgttgctatgatcatctatcgatatctgatgatcaacccttgttgtcaagaactcgaaagtcatggcatgtcattgtagcatgtactcagaaggtgagctagcgagtgagatccacacggacatcaaagtgtattctgcccgagtctccccccgggagcttgactggcgacaaagaaaaacactacaatgtccgcgaattcatcatcaaccgaccgagcccccccgttcgaaatagatgaggatgggttattccacaaaatcaactcgttaccttgttcgatcgacgcgaacacagcaacttttttacattcaatcgctcgcccgtgtttgtctgaattaccatgtcactcagatcactcggcctgttcacaccacgcctgttggctggtcggcacggctcgtcggccttgccccgaatctcatgcgcattcagcacctcgactcgacgtttcgaatcgcattcctcttccgaacctctccgattctcactcggcgtggcatactcgtcgaaagagacccccccgttcgtctctcgtgaagaagccgaacaggcggggaaaaagggattccaacccgactcgaagatcgggaggtggaagcgcgagatgatggcgctcggtggaggtcggaccgagttgttcgatactaaacaggagagcaaggaggacgattggaccagggtgaacagcggggtcgaggatcggagaagatggggtagcggggaggattcattctttattaacgattcggtgagtccgggcgtcggggtctcgagagcgaggagggtttcgcactgactatacatcgacgctggtgtttcctagggcaactttgtgagcgcccatacagacccgatcgcccccgactactcaatgaaacctatcccgactgacggccgtccgtctccactttgcttcgcttgctagaaaaccttcctcgccgtatcagatggcgtcggtggatggtctctccaaggccaagacccttccctcttttccgaatccctgacgtatcacatgtacacgtcgacgctcaagaaccccagcgcgaaacccgtcgatgtgctcgtcaagggtttcaacggtgtacaggccgacgagggtgtcaagtgtgggagctcgacgagttgcgtcgtctcgctggacaaggggagaggagtcttggaggccgccaagtgggtcaagacttgatctacaggggaggcaaagacgccagagctacccagtctgatgatcttgtcgttggcgacagtctaggagatagcgggtttacgatcatcaggaacggcgaggttcactttgcctcgaaatctcagacgcactactttaactgtcccgtcagtgcagccgacgagatggccgcggggaaattatgacgggctgatccattgctccttcgacgactcgacagtggcaattggccaagacgcccgagagggataccaactctgtggtgaaccacccagaagaggccgagatcttccaacagtctctgaaaccgggcgacatgatcgtcatctacgtgagtccacccgacgccgctcgtccaccttcagctcggccattgacaaccccgtacacccgtcgctcgacagacggacgggttttcggacaatgtacatccgcaccagatggtcgccctcttgaaacacgtcgacaagacgctcgactcgcccgaaaacgcctttctcgacccgctcgaacgcgaagtcgaacgcgccaggttgttggccgacgtcctggtcgcgtacgggaggatggtcatggggaggcaagacgtgcagacgccgttcgaaggtgcgtctcggcgtcaccgccagcgagggttttcgctgggcaagggggcttcggcaggtgatatccgtgggtctgacgatgcgtttcgttacagtggaagcggcacaaaaccggttaaagtggccaggaggcaagattgacgagtgggtggtgatccggcgtggagctttatgccatgatatcatcggctgacgttgtcgactgatatctcttcttagtatcacggtactcaccgcgcatgtcgggcaggattaagattgagtcgaccggggacggaggcacaggggaaggattacatgtactcgacgtgcgcaagcaattactataccatggtgtccacttgcgagtcggcagcggaagatcacccgattgaagcctaggacggtttttgggggatgacgttctatccgatccgtcctctgctcgacgtgtggagatgaaccattggacaagattgcggagcgtcttgaaccggtgcgaccacgatatggccaagagcgatattgccagtgcagccaaggcagaccataagtgggttgcatgtcacgagcgacctggcgtgatagagctcagcgatgaccagtcaggagattggcggcaatcttgatggtggacgatgtgcaaggagcatggacatgtatatgtgcgaacgtatcgacaggtacaacaccaagaagaaagactatccgtcctcaagcatactctcctccccacgtacccgccctttcggacgaacacggacccccgaggaaacgaatccccgaagagagaaaatgaaggagagaatatagaagacacccccaccctccaaaatttttacacctctccctacgtatagggagaagcgggcgggcgaggggtggtttttatgggctttctttttgacccgtccgcttgtggtttaattttgtacaaagtggatgggcttcgaaagagccgggatgcgggaatgtgggaacagaggaaggggaatggaaggggaatggaaggggaatggaaggggaatggaaggggaatggaaggcggatggaaggcggatggaaggctgtatcttatacacatctccgagcccaccccctctccgcccaactgatgctccgcccacccgggatcatgacctgtccagcgccgtactcgaacagacggtcagcactatccaggaggagaacgccaggttaaggaccaagttggaacgattattggcactcgcggggaacggatcatccgggaacgtcggcaatggatctcggtctgctacggcgttgacaagcgtcatcgaccctgcgctcggtgatgggtcagggtcagggtcagggtcgggctcgggctcgggtgtgggtgcggaccagacacggaatggtccggtggtgaatactgtggatacgggtgaggatgttcagcccgtcgcttccggctcggggatccagccgccatccaacgaggaagacctcgtcgtaggatccgcgcagcaatccacattggaagtcgatctggggcagggaatggccgtggacctggatctgagcgggagacagatcggaccagatgccgaaggtacggaggatgcggaggatatggtcgtcaacgggaataatggtctcgtccccgacccgagtcctaccgcgccatcgacggatcaacaggaaggtcgggatacacccaagaccggggtggaaggggagttggggctggatatgactcgattgagggttctacaggaggagttggagggactgagacgacggctagcaacgcggtcgacgagcaagcccgcagagaatctcgtcgagaccgttgacgcggaccttgtgtcaaatgaccacgccgccggtgtcggaggacaggggacgggcgacgaggacgacgccgatgagcggacagccttgctcgcgcacgttcgctttttgaaggaggaaaacgaacgggtcggacgccaacgaaagacgctggagagggagattgaaaagagaaagatcttgctcgccagtcgaaatcatgccagcgatgaagatgaaccgactacgtctacagagttggaggacggggtgggtgtggagagggccttgttggaggttcggggatggttggacgacgcattgaagacttggtcggcagtgagtctctgttacaaattgtcccgatttacaagacgctgaatatctctggcacctgacgatagaccggaatattgcaagtaccggcagaacaacccgatccggttcccctacctaccatccgacgaactgctcgaccgcgcaaggaaaagaccacacgtcgtggtcgaccaccaggatcaaccaaccgccgaccagcacaagaacaggacgcatccgaagttgacaccagcagaatcgcggaggataacctagatgacgtagagcctcgactcgacgagaccgaagtgcagcagggccagatcgagccggtcggcacagtcgacccagacctagtcgccgccgtgaacgcgcacgaggtagcgacagacaactcacagacggaagaagctcaggctcagcagaacttacaaaggattctcgccctgtactcggctggtgcggcgggcggtgatgtagattcggtagtgaacggcgtcgcaagggaggatggacaggaggcggagcaggatgtacatatgcaggatgtaggtgggaatcgagaggaaggagcggactttttggcttacctcgcgagggagacgaggaggacatgaagttcttcctttgtactgtactcttcatagccttcaaagccgatgaatctaccgataagaaatgacagaaggcgatgttcacttgatcgtagaccacgcgagcgacctttgtttgccggaacagcaagtcgggcgttcaatggttgtttgtcagcaggtctactcgaggccagcgtcttgcttgggcacaaaggatcctgctctgacagtcgccacaattcggacataagagaaggacgacccaatctgtccaaaacccagtgcatttttgcgcaagggactaccgtcgctgtcatcatatactcaggctctccagctcgatcaagacgtggagtcctcttgtcgacatgaacctcgccagccttgttcacacttctcgacctgattgggtctcaacgctgtcggaatcgtttgcagacgatgatgcttacaagtggacagtcgacacaaaagcggaagattctcagcagcagcaggacttggaggcttccaaagccaacgctcaggcgccttcaacaaccgacaatccagccttgtcgacagaggatccagcgagaccgtcgaatgatatcatttgggacaacaagtacttcgagtttcaatgtaaaatgaggtctcttgaggacgaaattacccgcaggcttaagggttcgccctatctattcgctcaaggccggagcccggccgaagagaacctgagatgcagcgttttcgccattctccaacaggatccccgaatcctgcgagaaatcaatttcgaaaaagccgccacgcttatagactcgctcatacagccgcaaaccgccgatgataaggaaagactagatgatactaggtggttacaaaagctcatagggctacatggagagatcaacgggagaatcttgatggctaaagtggtactcctggttggaactgaacgaaaatcggaatgagagccgtttctgcgatgtacgaaagtcgaattccagccggattttctatctgagctatcagatgttacttgtcactggtatctgcgcgttagccatacagtatctcggcagccaggaccttggggagcctttctgcgctgcgtaagcacaccctattagcgaggcgagggagcatgcaagcgcagcaactgcttcggtgaagaatcgcggccgcttgaaattcttgcgtgttgcctggatgttaatttatgctactgaaactgatgcactgaggcttctcatctgcatttgttgaacacacaaatacttacgccgaagatgtctggtatgtagacgtgtaggtcaaagacctcgggaggcatcctttcaccgcgattgcctggtatcatcagtcagcggcgccaaacgcgcgccttcagggattattagggggtaccggcaaagatggctaaaacaattgcaataataattggaacaggccgtgtcgtaaagcaagacatccaatcgttggctctcagaacggcctcgtccggactgacgaccgaaagcacagtaatgattcatgttgacaaataggaagtgggtcgcccaccgacataatatgtcacatcacttacgtaatagccgtcgggaatagagccggatcaaacattgacaggagcgtaaagggctctcctaggtcgttactgcctgatatgcactaatgtcaaagggacatctgcatctttcaccaaaggccagtgaaatctatcacgttggccgagacggctgttccagacggaccaactgtccatgtaggtgacttgactatcaccaacattatggtaagaggggaattcgactgaaaagacaccttgactgaagtctgctccatgatctccgtctgtgagaatgaccaagaccggctgagcatcgccactcgcgacctagtagggagatcagggccagtcagaaagcgaaatgcatcgagttcttagagctcagttacttaccgcttcagcatcgtgtttgactccttcaatgatctctgcagatggatctgcagaagcagacttgccctccacagcgacacactctctaccttggagagcgctgcaatacctgaccaggaagggtgcgatctcggaaatttcgtaatcctcctcgggcttttctgccggtatcgcattttttagcgctttccccaacagatagacccaatgcgtagatctatcgtgtactacgcggatagttgccagctgagcgagcaagtctttataggcttttccctcgtagctggcgaaaaaatggccgaaggtgatggtaagtttttggttgtcgggtgttaagcaccatccattttctttggtagatttgccatcaatctgaaacatcaacctggggtcgacaccgcgctgatcaaatttaaaacgtcagtgatacagctgccaatctgataaagctgccaatctgagaggaaaaacgctgacatgggcaagactcctcatagctgccaatcgcgctccatataaccaattgtaagtcgccccttcggtcatcccgacgtcgaaatcctgaatctctccttgagaatcgagattagccttgccgctttcgccacgtttcggcgccagagcgcggcgccccctttatcgatgcataaggtcttgatatcctcatcggtctgttgcttatcgttttcctcattgtaaatattgtcgtacgtctgccggggactgattccggtattcagaacagaggccgctgaaggtgtggaagcgaacgctcgcctctcagcttcaaattgtcgtaggtacagtcgcacaatttgctcacctttggcggtcagcagcaacgttggcatgagtgctgcgaaggttgtgtggaagcgcattgatgggtctgcggtgcaagtctcttgcttcgaatctatgggttctgcccgtaacttcttattgtgaaaaccttgattagttgcgtgcatctgttggagctctttaatcctctcgatgggctacactgataaatagcagcgctatcactgccgcgtgatgcacccaacgtcaatcgaagaagcatctcttggcaggagaaatacaaaggagacttcgcaggggatctgcggggaaagcagtaacacaaagggaatcattccttagccttgcgtcctcaagagtatcagagtttgaagccgcaacatgcaacaagtgatccagtaacatcaccgatgagaggtgggagagactgccttggtcgatcatccccctcttcttagtccgtttcttgtcaaaagatcacgccgatgccatcccggagatggttcgtacgactttcatgatgagacgacggatcgctcatgctctatcttggaccagaatgggtgctgcaacggtaatataccaacaagtgactcccagcgcaccggcctcgtgtagatgctgggcggacgaagagtacggagacctgaactgctttgacaccatttgttcaagcctatccctgcatctgtgtgtatcatcatctgatgcgctaggccgatggctactttgcgtcctattgcgcgaggcccactgcgccgatcaccgtattctttgccttaccaacaagaagcgtatcctgcacatctagcagtatgtttaatttcatctgttacgacctttggaacaaaggcccccacgaagatgctatgaaacatgcaatgccgaggattgcacccaccactaaaaagggggttggtgtcatggccccagctttttttggaatatctttgcttcatcctttgctggatcgctcgctcctgctagatccacatttgacatatatttggttcatgaaactgacagaattgtcacctctttggaattccgctcactcgctctgctccgccccactagcatgtatagccggcaactagaaatgacccttgacgccactgaagccgattgtcagaaaagtaccagcatgtgctgaaatgacagctttgatctcttaatatgtcgattttcgcaagtatgcaaagatccagttctgtctatactgagtattcatcttggtaatggaattcatcggattttgttggaaacatcctcacgtttggtaagtcacaagtttcgcaacaatggacctgaatcgcctttcaacgctagcccctgatcgctaatatgtgtgtttgaaccgatcgcgtgactcggattgaatcttgcatagcaaagggcgttttggaagtccatcacggctaatcgtgaaacggatggattacttcaggttccgttgcaaccgcttgtgtagcgatttgggatcgatgctgatgacacgaaaccttgcgtactctgatagcagcaatcgaagcagcaatcgccaggtcatgtgttggtcctccacgttccgagggggacacaggaaggtcgcgattgaacacatgacaagggtcccttctcgcctggacagcttgggaacgccgtattgaaagtaatacgtataaatacggcttatttacagcccacaacgcaccatctgcaggggtaaggacgcacctacgcaagctaccactgtcgaattcagcagacagtcatgtcgcttccgtcgcttccgccaacctcctcgatatcatcatcggggttagatccgggggtaaccgtgtcgcctcagccggatgggccgctcgggaaatcctcaatcgttgtttcctcggacgcatcttccgtcattaccaactcacagccgtcattttacaaagtttcggacttctctctgggttggctctcgcaagacagctcgatgtttggtgtaaggatctgatcgtcgtgggtcgtccgagaccgggaattccagcggtactaaatttttgaaccgtttaccacttagtccatgcccagtcattcgaatgagcagcgtgacccacacaccggcgaatggtcagatctacgtgatttagcgaccattcccttgcacacgaccatattgagcttccctgcggacggctggactgttcgaaatcttggctatttccaggcaaaggcttgggctcgtgtcgtctctttactcgagaagctcgaggtcaagcttgaaaaggaactgacccagccagtacttcacccaaaacggactctgctaccagactatacaaagtcgcaccgcaacgctatatggaggatcttcgatctggccttcatgagcgaagataggattgggaagacgaatctacaaagtgtgtatttgctactcaagcggatgctctcgatagagctcacagacgatactcaagctcaatggaataatatgctcaagccacttgtcgatgaggtggacaaccgtatcgttatgcaggagctcacgctgacagacgcagcagtaccgtgctcatgctgtgggaagaatctggtggggacgtgttactgtgttttcaatttgaagagtcgtgtccgttgcgccacaaaactagaggatttcataccaaatgtttctgcaacacggtcgaggaacattatctacaagcgggtataccctcaccgacacctcccaattaccttccactagaggactgctattcgattgacacttagtaaaccgcaattgaacaaaacatgatactagtttccattctgattgcctaccttcacctttgactcgatcatctacgtcagacatgatcagcagagtcagtcctggtcagactctagatcatcgcttccatgttgttgccagatcgccaagtagaaaaagacaatgggcgatcagagtggcgaacgaatcactcgcggagctcgatacggagttatgaatcgcgcgtggcgttgatgggtagacaaaggaggccaaatcggactgtcgcaatatttctataatttgatgaccgatcccctttcaggccacatactgatgcaagcaaaaacaacatagaggccgctattcgaatccgtcttccgtgcatcgtcttccatcgaaagaaccacgttccgatctcacttgcatagtacccagtcataatccacaaaaatggctgcccatacccttggcagtgatttcagcctcaacgacgatgacctgaaagcgccggatagcagtattcttactcctacaatcgatacgacgtggctgtaccgaattaacgtaggtggcaatctcttcacgcgcatgtctttcttggggtgctgatggtgttcgtgaccgtccattcgggtctggtcggacgatctgtaacccaatgactacagcaaggagcaaaggagcgtgacgagaatactcagagtactagtgctactcataattttgctactggttgcagtaagacgtgcactagaacccattacaagtgggccgaggacttgctccagacgcctctcatagaggaaaagtggagactcgtcaagcaggcgttggtacgacttgggagatatatctataatcacatgaggatccctgtgcccactcaaggtgaaaatatggcgtatctgtatacgtgggagggagaggatttgagcggcatacgagggatctttcggctggatgggatgaactcgaacgtgctcgccaagatggaccatcaatatatcttgaaatctatagagggcgtcctggaatgcgaaacgatactgacgccggacggccacgcagcattgggcactctcgtctctgttgttgatcaacaaattcgtgccgccgaggcatgtacttgtcctggaaaggaccaacgcctcgcccccagctcatgactgacgcggaatatgagtcacctttagtcaatcatagcgaccatgcgcgatgttgatgacaaggcgcaagattatgtatatacataccattcaagctcgtgtgccaaatgaatacgactgaaagctgtgtgcagtcgagtggacacgtcttcggtgccaaattcgggtatcattattattattattatcattgaaatcgtcgatatcacgaaacggtgctctgtgtttcgtgtcctgaaacgatcacgtgattcgtcttgaactcactcgcgcggcaccaaagagatatcaacaactaacaacaaccaacaaccaaaggtcacacagatgtcgtcctggacatccagtatcacacatatcaccactcgaacaagctcagattcagcggacaagagaccaggaccacagtcccgtctattgatagtgtactcctgactgcccagaactcggcttcgtaactacggtctttactcggtccatccaccatcagaacggcaacaaccaacaacaacaacaatcaaaacaaacaaacatcacccatacctctcgcgaataagtctttgtagaggacaacttgaaccacacagtccgatcgcaattcggtcagtccatcggtcaaggtctccccattcaaaccggtagtctgatcagcttctatattgcagctgacgatcccagcacgagaccacgacacaacgacacgaacgcatcaagatgagcgcacccggatggcagacctcggagttggacgaagaatggccagatacctccctccccctctccacccgtaacgcctcgagctcatcatcaccatctgatctcgacgttcaaaccagttcgcagaagtttggaagtcttaggcaggtcggctccggtcgaccgtcgagatctccatttcaagccaaagctcaaagtcaagctcaacttcaaacaacccccttcagaatcgtctccggccacacccagaactccctaggctccctcctcgcacgtccaccagtggggacgaccccgcaagatgcagagagggagaggaagaaatggggggagaggtctgtctttatacacatctccgagcccacgagactagcgctcatctcgtatgccgtcttctgcttgaaaaaaaaaaaaaaaaaaccaaccagtcacccagtcaccctccgccaccccctccccctcctcgatctcggccggtttagtcgaacagtcgatgatgtgatgttcaagtggcaagtggcatcgatttataaagagacgagcaaaacaccatttctcgatcccatttcgccacacggcaccatcaaataccttgcttgaaatatcaatctcaatcaaactcgaatctactctataaaaaatgggcgacaacactaccacctccacgaccaacgtcaacaagctcacgaacggcgaaagcaagtgccccgccactcattccaactttcctcgatatgaagaggatcgtcatgccaaatccaccgagtgtgtctatgccacctcgaacggtattcccatgcctcacccttacgaggcacagaggatcggtaacggacctctcctcttgcaagactttcacttgatcgacttgatcagccatttcgatcgagagaggattcccgagcgtgtcgttcatgccaaggggtacgtccaccgcgtcgagcctgcagggcctcgtcggaccctctttgctgaccatcacctatgccaacccgtagtgccggtgctcacggtatctttgagtgtaccgacggtctcgaggatctctgtctcgccgacatgttcaaaaagggaaacaaggtccccttgaccacccgtttctcgaccgtcggtggagaatccggttcggccgatgccgctcgtgatcctcgagggttctcggtcaagttcaagacgtgagcgttcgacgtcttggaaattcatactcgtacacaagtattaatctcgcacggtttgatgatcaggtccgagggcaactgggactttgtggccaacaatacgccagtgtttttcttgcgagaccctggtaagcatggtcgtacaggtcggtctcgatgagccccgtagctgacgtcgagccgtctacttgcagccaagttccctcactttatccacacgcagaagcgtgaccccgctacccacttgaccggtgcggatgactctaccaacttctgggactacctctcgcagaaccccgagtctatccatcaggtgagtccactactggcgatagagctgaggaagagaactctcccgctgacccacgctcccgccccgcctcccaggtcatgatcttgttcggtgatcgaggtatccccgatggttaccgacacatgcacgggtactacggtcacaccttgaaactcgtcaacaaggagggcaagtgggtttacgcccagttccacttgctctctgaccaaggagtcaagaccctcaccgcggaaaaggccgccaccgtctcgcccgattactcgaccaaggatctgatcgaggccatcaacaggaaagagtacccgagctggaccatgaaggttcagaccatgagcgaggagcaggcgcaaaagttgttcaaggaaaagggcgtcaacgtgctcggtgagtggagcgtcgggaatgagcctgcctccggaccattttggttcataggtgctgaaattagcctgtttttcttcggagaccttactcatacatggagccaaaaggagttccccttgaggactgtcggaaagatgaccctcaacgaggtgagtttacttggccagcgcaattcgtgtgtgcgttttcaaccccgtgtccaatctcgctgaccctgctcgatcgtctaaatcgtcgaccaggccccggagaactactttgcagaggtcgaacaggtcgctttcaaccctgcacacatggttcccggagtagagccctcggcagacccggtatgtagcttcgcgctcggccgtacgtcaggccatcttgctgagttttgaggtttggcacatatgcaggtcttgcaatcccgattgttctcgtaccctgacgcccaccgtcaccgaatcggtgccaactaccagcagttgcctgtcaacgccccaggtaggtcgcggtcgcgtgttcttcttcgccttgggtagtgtgctcatcctcacactttgatgaccgggttctagtctgccctatgcgattcggtaacttccagcgggatggaaacatggccttttacaaccaaggcgtgagttgacgacgacttgagaatcgttgctctccccctcgcccgacgactgactcggtttttcttctcgtcggcatcctaggcgcgtcccaactacttgagttccatcgacccgatccagttcaagccccgatcggtccgattggacgaggtgcacaacaactttgttggagacgcagtcacctttttgaccgagatccgagaggaggacttcaaccagccgcgtgacttgtggcagcgagtctttgatgacggtgccaaggagcgattcatcaagaacatttcgacccacatgtcaacttgtcgagagaagcgcatcatcgctcagcaatgcgccatctttgccatggtcgacaagaagctcgccgatgccatcgccaaggaggtcggtatcgacagctaccccgacgcacgtgagatcactttcaacggatcccacagcgctctgggcaagcagaagatggctgccaacggtatggagtacgagttgaaggagggcaaccagaacggcgggcccgccgagcccaaccgggactcgaagttgtagtcggactcgaccgaacgtgtgactagtatcgtactgtagccttaaattacaatgtcatcatcattttgctgcgtcgctggctcgaggatattcaaaccgatcgtcatgtctcagcaggcgtctagtgcagcctggaccgattaggcgactctagttacttggcggctggcatcgttggccgtgcagaccgtatggttatgattgtgagcaacagcaggagctgatgttgaagatggggggattgagaacaaaggagctgggagacgactacgacgaacgaaggatggcatcagccggggatgagacccatacctgcgcaaagtcagagcctgcaacctgccggggtcggatgggcttctggatgaaacgggccaacaagaatctcttcatcacgcgacctccaaaagctgatctgcaacggcgcggcaaaacattgcgcaaatggctgaagttggtccctactctccacgccggccaagtatcgactagtcgctatccttaacccatggactcgtcgagtcgtcgtcgccttctacgcggacttggtagtcatcagcgcccgaggaggtcaccacggattctttcggccgtcccctgttgccttgcaccgagagtcaaaaggtaatgcaggtagaccaagatggataagagacggtcgcgatgtatttcgcgagtgccagggaatgagaccggagggatttcgcggcggttcgcgtgcaagagagagattttgaatggaaaaaaagacaaaaaacgaaaagaaattgccacctttgtggatcgaacacaagaccgcacgaaatcgaagatataatcacttcagtcgtgcgctctcccaactgagctaaggtggccattggtgttggcaaggttgctatctgtatataatcttggtatcacaatgtctgagccggttctctccgccaactcgatcttctacactagactcggcgtgatccaaggcgctataccacatgaacggacggctccccttgtagcccaactcgaggattcctatggggacgtctttcttctggcatatcgtgtcacaggtacggttcggctgctatcaagccgctaacgctcccccacgatcttttcctgccggcagggctgtaaaggtctgcttgcgagtcgagacacgctctgcatgaaagcgcgtagatcgacacggaactacatatcaaaagggacggcacttcacttcgacccatcgcacttggcctggtaaacagaggactaacatgataccagcattctctcgcggcgcttcagccaacaagtatagccatgcgtacgcgctcgagtcgaccctaggaggacacgcgtcctccttacacataggctgacagctccccagcgataattccacgacgacgaccccggtgacccaagtgtcttacggctacgagcaaaatcctcgtcgttctgcaagacaaacctgggattgtcgacagatgtcgcggaatgaaaagtcggccaacttcagtgactaaactcctccagtggaacgaccacttccgctgacatcatcgtgccttgtcgtcgctcagactgggctcactcgcccttccgggcgccgagatagtcagtcctcgggtcttaatctgtggaatgagcggaacgaggagtggtaatgcgccgccctgcttgctagagatcgatgatgctcggtgcaagctcaggtcacctcgaaggttctggagaaaatacgatcacgaccagggcgacaggccaacgcaagggtcttcctcacctgactcaacgtcggtggatcgtcgattatcgacgccacctattgcgacgccaggacctgggaccacagcgtctacagtaggccgcgcctctcgtcctgtcggaaatagcatacattgccacccgaaggatcccccgctatctatctggccgtcaaggcaaagtcagtcatgtttagcactcagcatgatattcaaggggaatcgcctagtgtatcgcaaaatgaggctcgttacgttgaagccgtcgcaaccacacgttgcacctcatcgtttatcttgaatggggtgtcaacaggtcgatatcatttcctccgaacggctgcaggctctttccgtgccgacccaatccccacagtagccatttcccactgtatcgacgcaatcggtgcctcggtcatcatcagccacgacaaccagagtagacctctcgcagcgacgatcccttccaagctcattcgttgactttgttcgctccatctgcagcttcttgaaggcgccacttttcacaaaccgcttgctttactattgcaaaccgatctaggttccacactctggcagcccccattgttgagcagaccgcacgatatctgccactagaaccggtccagtgattggcaaggtgggcggcattttcagtgccgttgagcccttgactcgtcaaggagaccaaagccaggtgatatgtccgggcaccctccatccgaccaatggaagcaaagcccggctatccgattcctcctagtacttctgtgaacgatactgcagatgaaaaaggatcgacctccttcgacttagacattcaacgctgtacaggatcagcaacgcaagaggaggcatccttcttatcggtttgagcaaggaagaccagaccgaaaccgaaaccgaagccggcccgattgacgtcgacaatgacttagcggggggccgcaagtcggaactggccaaacgctggaagcgaacacgtctgggcaactagcgaggggaagaaagctgatgtcagcttttgcttcattcagcccgaggtaccgcaagtttcagcaggtatttcgtgtgaggcagagtctccacacattgtccggcagatatcgatcgattgagcgcgcaagttgaagttgaacacagcaagtacatgatgaatgttccaattcgttcgccgatcaactggagcgaaggtctgcatatcgggctctcacacagctcagattgctcagcgttatcagtatactttatgaccctgaatgattgtgagatcgatcaccaacgctggcggccaggcgatctgcgccaagatattacgccccctcatctccctcatgaaaccactgatcgattccatgttcggatataggtttgatacgggatcactcgacccacactagtttcgtctatatacacagctcaggtcgtcgtctatctactgagaatgtccgctccgatcgtgcgagtcaaaataggcagcgcgtcttcatgcgctgagcgtgtaggccgcttgttgcttgagcaaaccggcgtccctaacacattcgttgccaacgagtgagtgacctcggagacacttggcgaccacgcactgcttgttcaagcattgaacggcagagacgccagggaggtcggtgcagtcctgcgcctcggcagttccgggacctgttcaaacgcgcgagaaggatcagccacttgcgactcgagagaaccttgtcgcagcctgctgcgcgcgatcaactcacatccaccacaggcctcaatgtcgttttccatgatgcactcccatcgatttccagggccatcgagtcggcaagctcgaccctggttggggcaacggaagtgtcgaggaggaagaccgagggcagcctcgttcctgctctccattcgcttcttctgcgaggcgtccggcagggacgccatgcatttgaactcgacctttttggtcctggagcatccatccactgcgatttcaaacaggactacggaacccaaatcgtcagctgcagaccaattagcctccggatggcaacatccacttacaaatggtacccttcttgatggcgtcggcggtacagatctccttgggcttcttgttacacgtgttcttgcctggtccaccgccgaggtagatcgagaggtccagctcgctgtttttcccgtcgtagccgtaaaagaggtccaccgcgaggttcaaaccctctcggtcgttcctgcgatacgagcggtgaaagactgttcggcatcggtgatgggacagggcggacgacgactcacttgcagcaacctgccttccacgcgttgttctttttctctagcaatttgacggtaatagcgcgcttcttgcactctagaatggagttgcgcgttaagaaagcagcctaagaggtaacacgtgccttggctcgggcgacttactggcgacattataagtcagatcaaggtcgatgtccttattcttgttgatatcgttggcctatcatcgcactcgttgtcagtccgatggctttgttttaatacgcagcgcactatcctcctcacatccaggaatccgttgaatccgggcagcgagatcgagtccaagcagtcacaagcggtggcagtgtttttgagtggttgagagtttcggggagggttgaggatgtcaaagaggtcgtcgaacaggtcgaacagtccaccggtggctcgggtcggcgtgatgctcaagaagaccaaggccagggcaaatagttgcgagaagagggggaaagtgatggatcctgcgcgcatcgtagtaggcgtatgtcgaagcgagcgaaatggagtcaaagtggaaagagttatgaaaaagggctgagcaagaaaaggaaagtgggggaggactgctgataattatgaaggaagagttgacggtgaacaatttgtgaaccggcgcaaaggcgacaaccccctctgccacccttccgaagaactagccgtgagactatataccttgggcgccttatctgtcccggctggtacgacgatgaaaactccgatccggcctgcctccgaatcgagcctttgcggtgtgatgcaacccacacccccctacgccctgaatctggcttggctatcgggtgacctgggaactgtaccgagcccggaccgctgaaattatacctcccgatcaacattcatcagaccatcttctcctgtggtgatctcgataaagcctagtggacgtcgacaatccagcgtcgatgctaccggtatgatggatcgcgccttgaaaaatacgggcccgggcccggatggagagccagtcgtccggtcagtgtcgcattcagtgtgagggggaagagacgatatgatagagcttcgggtcgcaacacgcccatggcgcatgggtaaacacgggtcggaggatgtgaacatgccctcggccggcgcagtgagccgctcctcctcacgcccaagccgaatctcgacagggattgatcgatgacgcgctagaggccgaggtgaacccaaagaacgacgggtagacgagcatatcgctcggccacgatacgcgtggccactcccgctttcccgatgtccgagctggtctcttttttgggtttcggaataaaacagaggctaccaatatggtgattcctcggcgcattccttttttgggctttgagtaaggtttatcgcgaacgatcaggttgtggcacgaggtggagcggcggacttggcgcacaggtcgagtctatcacgggaacctagagggacatccgcttcctacagcgaaagctgactacctgatcctatcgccctccaccacaccacgactacacaaaaggggacgaaacgacctcgagcagggcgggcaagaaggccgagcagaatggaaacgggaagttaaggggtcctgtctcggatagtcgaaaagtttaatgacaagatcgcatccatttccgcctccgaaggggccgggggcgaagcgggatgggcgttgaacccgggaccgacggcgcgcgcgggctcccgggttacctccgagagagggcggtatgaaggcacagccggtatagacaagacaccttgggggtgtagagttataaacggatgagagagagagaggtgggtctcgcagcccaggtaaatagaagggtgatgagggaagatgaagacgtggtgcgagggtgaccagctcagctgtcgtccggtggagagtcatctcggtgttggctttccgatgtgcaacgtgcgcttggctgacgacgttactgagagctcgtatcccgtcagaccggccgtgcgcaaacgttagtggctagtcgatgattggtctgtttcatcgtcgagagcatatcaaacaagtattggcacatgaattcgacttgaggtgatttcattcctggggaaaacgacgtgccggccggccgatgcaatcatgcacatcgcctgatagacagtatctggtacgaccttttggcataacagactccccggcgggagacgatgaggttgtccaggcagacgacacggggaaggggggggggacttgtgattccgagatagagtttatcgtggcaaagccaaagatgtcgcgggtcggtatcggcagcgttcgagcgggtagcgcaacgagaaaaggtccgcatgggtctcgatcgatggcgaaacgcgattctcaaatgttgcgcaccgcgggtggaatcgaggtgatgcgatagaaaactggctagaagcgcgtcagcgtgtatctcatcaagaaaaggtggtaagcgcacgttctctttccatgcccccgacgtcatgtttcttcgcgacgtcattggacgcgagtctcaacccgggtcccggtcgctttctcgcccccctcccccacccccacttgcaggtgatggtgatgctctcgaatgatgatatcatgatccatccccccctcacccatgacccgttgataaacgctttctcacgcgtcaaattttgttttaagcagatttaaggttccccttcaattaattccgctttgaggcaggaaaatcttgaaacatcatacttgacggcatgaatgaatcctggatcctggaggatttctgtttacaaacactacgggcgagacggaatccctctaactatacaaggaagatatcgttcttgtataaacaacagccaaacaacagcgagcgactctttatcctcaagctcgaggggcttggtactcggaatgctcggcatcgcccttgaggtcctgcttgtccgagtgatccaattcgtcctggtggtggtccaagttgaattctagagccaaaaggttattcatcagcttgaatccaccacatcttcgtacaggacaagcgggactcacgatcgaccttggtgctgctgaatcgccaagcgggtacacggttctcgaacaagatatcgagctctccgtaagatctaaatgatcgcacgttgaaagatgcgatcagcctgctggaccgtaagcatataagccaatcagacttaccggtttcgggtctcgggaagtcgcagggccatgtagatcaatgtcaaggtacaagtcccgacctgtaatgacgcctgatcaggtacgcgctctgcttggcatgcattacattcagagactcacgaagacaaaagcgctcttggacctcaaattccatgcatcaggggaaagcatcctaggaactgcaacgatgagcgatatgaaagtttagttcaagagctttcgtaattagaagcacgcaagcccgactgaccgataattccgcagatgatgttcatgatctggtacgcgatacgggcgagcacgaccgtcttttgtctcaatctgtattgtttaccgggtcgaagagtcagtcaatagtcggattcgaaagggttcctgcattcagacggaaacgtaccgagtggatccaacttcactaatcagagtgtaacagacgggtccgagggtcgagttgtaaatcaagttcaagcaaatgagcaagatactattgggtgataagaaggacggatgtcagtcagcggttcttctcatgcaggagtattatcgtcacgactgaccccgcagcccaagcggtaccctcggtgtccttgaaggccagtcctccgatgatgaggaggacgatgtccatggcaacaaaaccggacaggtagagcgttcgacgaccgaatttagaaagcaactgaacgcatacatgtcgcagtcatcagcgatcaagctaaatatggctcgtattctcgagatttgacgatactcacgaaccacgagcaaatcgttccgatacagaacatctggatgtggcgaaaagatcattgcacgcggttagcgacgctgcacatcgcatgaaacgacctgaagacgcacgctgttgagacccatgttgacgctgaacgaagcttcggtatcgataccagccctctgcaggaattgaaccccctgaccgatcaagttctgtccgctcaacaattgactatcgaccgctccgctggatcagcttgcgactcggcaaaacaataggtaatgacaaacgcgctcacccggcaaagaccatcatggcaatctcggaccttcgcctgtcgactccacggaaacagtcgatgtaactcgcaccagcggtggtctgcttttccatctcggtggtgtggatcatcatggccaccgactgcttgacgtcggtctcagaatagtgctcggcgtcggtaagtcgggcgaccgaacgctcggcgtcggcgtatcggccttgacggaccagccaccagggagactggggtacgaagcatgccatgatgaagaggggaacgggccagatccactgaatcgcgaagggaagcttccatctacatgagccaaagccaaagttagcgaaaaaatggaaatggtcgagttgtatagagatgactcaccccatatcagacaagtcggtgatagtagccttggcgacacctgaactgatgagaataccagctccccaacagaagttgacgtctatcgttgagacgataacctatcagctgtgattcttctcgcaccgctgggtcatacacctgacacgtacaactactgaggtaccctcgtagctgaataggacacacttcggccgcgtaggcggtcgtcaatgtctgcgagaggatgggaaatgccaattaagcttcagaatgggatcggaaggggtcgagaaacaccgcttacctggaagactccccaaggcagaccgcagatgacttctccagcgacgagcatacctgagaacggaatcatcaagagaatgagacacgtaaacttttcaaaatcaaccaaagctggacgtaccgagactgttggcgaaaaaggtaataaagatggctccaaccatggcgaccatcccggccaggtagacctgcttgggaccgaacctctcggcagcccatccgttgatcatcagaccgatgattcctcccgcgctactaccgttactgagggcgctctgccactgagcgggaatgtacatcgtcccgtcctctgcgacctgtccgaatcgacggaggaaagaagggtgtccgtagaaacttccgatctgacagaagggttttagtcgcaggcaagtttagtttcaggtagagttcggttcgacctatgattcgattaggctgcggaacttacgatgacgacgtcgtaaccttccatctatggataagaatgggtcatacagaaacgacggcgcacgatcagatttcagtgtcagacccatcgtttcctttcgtccggtcaacatccgaggacacccacgatcagagccgccgacaaagccatcgaccagaagactgcctttttatggatcttgaacgcctgtcggacggacatgttgtgctcggcggcgtctgccgtagcggcatccttgactagatgagcatagtcggcggggtttcccacgacattcgtctcattacgaaggaccgcgtcggtctccgacttagagttgaagcccatgaccatggtgtgcaagtgatttgacgcggggtaaggtgattatgggatgagttcgatatggaccagactgtgctagactgacccctcctcaaagtacatagtgggcaggttctctatatatcctcgaaagggcaccgtcatcgtcctcttgttgatgggaagcacatcacaagatccgtttccatccgtgtgcccagacgatctctttctgacaagaacacggatccgaaacggaatgggatatgagcacagagtggagaaagttcggacgctcgggcatcatcgaaagaaccgtgggccgtcgttgttgcgtcgtttcgagcgtagggacgctgggacgaatcgatcacatatgtcaagatgcaagatgatcaaggtggtttccccggcctctggcgatccttcccggggcaccagaacgatgacgggatgaatcgaccgattatctcgccgaacctcgtgatttgaccccgggccggtacaccggtcattcccgccaagccaccgtcggttacgcgaatgcgcgatcaggcgaggctcgccgcgactcctttgtctttggccagctttcggtccttcccgttgtagatcatcgggcatcgacggggcgacacggaggtggtgaatcgtttcacctatcacttggtcgaatcacattgccgagacggcaatgcctcgagcctcggacagcctgtctctacttcggcatgggcactgttacgtgtgatttgcgcggcccccgaacggatgactttgcagctgcaccgcatggcttggggatatgctaaaacggtatgacgatggccggggtccagttgttcacatgatcgggactcagccacgacgcatgtgcgctcggatcatcttcataccgattctagtcaccgtgtgattcgatatgccaacgtgcacctgaaagatgacctcttgaacgccgcatgaggcgcacggtccggaagagtgctggatcggacagcgcatgcccctctgtttggagggtggtggctattttcaatttcatttctatccctgctgcgacggagcgtttgacccgatgagacgagtgcggtgggattgaacgttgccggatcgctgcgattctattcggcctgtcaaaggtatctctcaggcagcagtatcacggctgtgcgaagcggtataccgtgtctcagccgcagagccaggcctgatatttaaaagtctctttcttgtcgttgtacctgatatccacaccgcatgtctagcgcgacatatctggggtcgccctcagacttgttgaatggtcaccgtgagtgcccgcacacgacacagcactgtacccaaacctatcctcatctacacacgatgctgatgaacagtgctgcggcaccgctgcgaagcgattctcgagaaaatcacgcggcttcgagtatgcagagaggcagatctatcgaacgcagcttgtctaccgttggctttgcatctcctgagtcagtatactcgtacttggttggcccggcgaaacagactacggatcacaggtatattatagtcatgtccacacccaaaagcaccctctggtgtcccgatctgcgcggacgatgaagctttaccatccatgtctgtctgacaaacgatcccgccgcccaagtcgggtcgacactagcgtgctgcctgtccaaggttggacgagatctcaggcgagcaggtcgtcggcgtctactccgagcctggaagaccagatgttcttcatctcttcccaaatcttctgtcccgcgacttgtccctcctgggagaggatcaggtcggatggtctacgaagtttccgaaaaacgggacattagcgctgggtgtggcgatagcggacagaagatgtcggtttgtccactcactcggagacgtggcagtcttcgacgtatgatcctgtcggcatctcttgagtcgccgcccaggtgagattcctcgcgcccacctcggtcgttcgagcgagcaacatcttcatcagtctttttcccacatcaaaaggtcagtcgggtcgctcctatgggaaagaagtacgagacgagccttgatgtactcacccaatgacgatgccgaccacgccggccgcgttcctcgtgagttccgaatagcagaacccggggttgatgctgttcacgacgatcttgtcgccggccagttgactcaaagttcgcacattcaagacgttgatggctggattccaggaaaagaatgtgtcagcttccttgctcttcccagaccttggtccggatcgctaggcaaatgcagacgacgctcgacttgcccttgctgacgttgtactgagccaccggtcggaaacgatccttttcagtgaaatgcttgtgcacctcgctggcatcctctttgtaacctgggactttctcagagacgtgatggtgcatctcggaagccacgatcgcaaggtgaggcttcaagttggactttccggggatggggttatctgccgtcttccgcagtagggggaggagaaggacggagaggagcgagttggcgatgttgttgacttggtacctgcaaagatccgagaggatttagtcactgtgtcgtgtcttgtaagcccgagtgatgacccacgtcgattcaaagtcgtcgacggtcaacttgaagacgtcggtgctgatcccggcgttcgagacctgatccacgcgcgcgagagtcgaacgagaccgacaagatggttcggttcagcaagcgatttttttgatgaacccctcgagacctggtcactcacgacaatgtccagcctgtccaattccttttccgctcgatcggcaaacgccttgacactcgacaagtcccccaagtcgagcttccacacctcggggatcgtcttgacggtcgacgggttggcgctaacaatctccctcgcggcggattcgcccgcttgggtgttcctcacggcgaggatcagtcgagctgggttggcgcgggatatggctttggcacattcataaccgagtccgctatgtgtccactcgaggaggtcagtggtgcaagtcaaagcagtctatcctgctgatggactcacacgttggatccggtgacgatgacgttcctgcccgagagatccgggatgtcgacttcgggaagcgtcgtgaattgggatcggaagaactgaatgagtgagaacttcatggcgtgttgactcgatgtgtgtggtttgaggacaagtgattatggattgagaacgagtcgactctgaaaaacatgagcgattgtgctggctgctggctggcagctatatatcatcactactcttccatctggactgattctcatcagctccggccggcacgacacgacgcgtcccccctttccccctttcatggcattttgcttccgtgccaccttctctgtattcatcatcctctcggcattacaatttacttccgaaacctcgtcgggattgataagcaagctatgagatcacgatccacctcgacaagttgccacttgcagcaaacggaaaaggttgcacatgggtcgagagggaattataaatcggtttcattctgaaacgttcccgagctacactgtactgcttgcttgaacgctacgtctcgccaagtcgacaacacctttgcgccgacttgatcatcgccgaccccgactgccgacgggtctccaatcaatcgccttgccgcctccccgttgaaccccacgcagaggtcgcatacacgctcccaactctgccgcccgggtctgatccgggtcgttggcagggaggtagtagtagagcggtaacaagggatgaccagacgagtcctgatcatgatgtcaacgatgggggcgtgtacgaattagcgagatgacatggcgaaaatgataatcttgccgctcaccttgcccttcctgtcgacccgtccaaacattccttcaccgcgcaagacatccccgatccaactcgcccatgtagcatcagaaccgagcgtcctcatcgaaggttgcgactgttatcagcggtattgcgaaaagtagagggagatagaggaattgtatgcaaagtcaacactccgctccaccgtttcgggcacatgtctgagggcaaaggcagacttacgtccaagatggtctttaccagatcaaaagcgctgatcgcgctaacgccggaaaagacgacgctggtagcgaccaacgccttgaggtccaggtcgaccggggggttagggatggacgtaggctcctccgtccccatattcgtggtgattggcgccatcgatggcggtggtgccggggtagaggccttcactggaggttgcaccggcgtgcctacggacgtcgtcaagacgacctcctttcggacgaccgaaacgggagagacggatttcctcttcttgttctcttccctcttggacccgacagtcgacgtgctcgtctccgcgtcgatcaactccttcttgacggctttgctcttcatctcgcccaacctccggagcacgaccgcggtctccacctgtccgggctcggcctcgtcttcgctatcgctagtcatctgcgaatagatagagcgagcgggagaggaagctgggtgtaacaccggggtcgcttcggcttccaaggtggccggcgaaggggtgagcggggtagagggggtggcgagttcgatactatcggctaggggcagaggcaagggcgtttccgggatagattcgaccgtctggagcgggatgaataccggttcaggtactggtgcagggttgaccacgatgggctcgacaggcttgggtctcgagacggtttgtttcgccgcgtccaccttgggcttgaccttttcgacgtcaagccctacctcctttgacctcgacttgactttctcctcccgttccttgtcgaccttgtgattcgtcgccctgggcgtgttctctctggacctcgactcgctcgacagggggttggggttcttgaccatgactttacgaacgacgacgtttttcctcgaaagtccaccgagaccgaacccaaagaacccatcggtaggggcctgctgtggtgccgatttacgagcaaacacgttgggcgccggtcgattggcggtagaggcaacgacgggggagacgagtgcgaagtctttcgacttgacggacaagagcagcgcaggaggggccgggctgacgacctcttcctctactgggatgacggggcctgggatctgaacattctgcgcttgctcatcctggtcatccctttcgtcctctatctcatcgttttccagaggcaaagggtcaagatccatgggcggcgagctgggagggaggtcattcaagagctcatccatccccgtcggcctcgcgtcctcgctcatatccatgtccatgtgcatgtcatcgtcctgttgttcgcatggcgaggggagatcgagcgagtgcaaacgcctcggcgaggaagtcggcggggagagcggggcgacggtttccgttccgatcagagccgcattcgcaggtcggaaagacaacaacgaagacgacgagatcttcctcggtccattttgcccggaaggcgcttccggtgagaggtccctgtggtcgttcatcctcgtccccgtcctcactcgcacctggtgatcggggtcgttttccccttctacgtcactctccgtctcgtcgtcctcatcctcgtcctcgtcgtcctgctgctgttctgcatcagatccacctagggtcggagggaccgaccagtggacgatcgtcttgcacgaatacatgtcaatctccacatccacgatcaacccgaccgatccccccttgccttgtccaggcaagacgggcgaacggatcgtgatgacccttcctgcggtgtaccgtttccccatgctcccatcctcgtcctttcgctcgtaccccgtccccgacacgcgtgcgccgaggacccggacccgacatccgttctgcccgaggacgtggatgagcaaatgagatgcacccttagggtccagagcgaggaggacgtggtgtctcgaggtatgttgcgctttacgtgggagggggacgagtctggtcgggcggaacggagcgggggaagacgggtcgatgaccttgtctgcgagttccgcagggaggtccccgtttgcccccccccccccccccatgaccaacggagacatacgtatcgattcttgcagtgttggcagatgccacagtggccccctccgaagttttggtcggattgggttggccatacaagtctgttcgactcgaaagcaagaactatttcatcttaatgtcaatcgatggtcctgaacgtattatggagtatcttccatcagcagaggagacatggtgcctttgtggcagacgaaagccggacgggaggccgaacaaggaggacgtaattccggttcgcatcgccctcctaacctgcttcaagagcggccgttgtcgctagaaccacccctccttacattagagtcatcgattccataagtgcagacgatgttcgacggggtggcaagttgtgagtatagcgtgcatgggcgtcctgcgtttcataaagggcagagtccaaaggcggtgtaagcaagcgccctcgctgagcgagccgcacatgactacggatccttttctttttgattccggtcgtttgtttacttttcgtcaagactgtgaagctgtgaagctgtgatgcagttccaattctgagctactcaactcgtcttgaattggacggatcagaattcccatcacgctttttcgatattcgactaccattgacattgaccccggaaactcagtataagaatagcttggattgcatctcccatacatcgtttggcaacgctgtttagctcacataccctaccgagatgcaacggtcgcagcgtccgaaatctatgatttttccgaccgggtatgaccggatcacgccagaccaggaaaggtctacagcaagcattttagaaacaacggggcaacctacccaacagaaggtgagcgaagtttcgttgctatccgcggtattcggctctgatctccgtgtgctttgaaggagctcctgtcggcggacgttacggtagatggacgatgatctgttctaccttatccacttgctcactctcttgccctcgtgtcgaactcaggagggcgaccatcgacagatcaaagctctccgcgatcttctgcagaggaaagatcaaaccatacataaaatgaaccaggagttggacgcgactaaggcagacaaggatcagctggaaaagctgttcaacggatcgcaggtgtgagttttccaggctgcgatcggtatcctttagactcctcatattggcaggcttttatagagaaaatcaaaagtgtcttcaacaaatcaacgacttcagagaacatgtcaaagtgagggcagcatgagggaagatatctacaagctccggcgaagctaagctgtaaatgaaacctatcagacacttgaagcggccttactcaggattaatggtcccgagtggagggtaagacagagccttaagcaacgtgactagattcggactactgacatatcatgccgattttccatctaccaggaagacttctgtataccacctacgcccggcccgcgctcattgggaacacccatgccaactctccggcacggggtcaaggacaggactacgcatgcgatgggacccccttttggaaatatggctcgaagctcggaagatgatagcactgaggacgtggttgatagcatgaggcgttacacgaccggcaacaagaaaatcgaacggaaagagacgaccaatatcggtcgcataagatctcccttgatggatcaaatcgacgatgacaccccgtttgcccaaagcagttttgaggaaggcgccatggacgacgtgcagcaagtcaagatgtctcctccaatgcatccacctgttggcaatggcccggctcctatggctttggatctggagcccatcatctcccttgtctcttcgctacacgcgtcctctcatgttacttccaccgagcttatcaattcaatcttagtcaaacacgagcaacagactgcctcagatcgcgccgagtcaaatcagaaccgccagaccgtagttcagcaggtacaagatgcccaagctgaggtcgcacgactttgggaagatatgaggcaagaggatgacaggagagagaaggatctcaagcaactgcttgacacggtgaatctctgagttttctttacgccgcgaatcattactggtcctgacgagtcttcttgccaggcaatcaaacgcttggagcagttcaacgcgaccggactagacacttctacggtcggctccattgatgtctccggggactgagccgtcttcctccgtcgcacgacatcatccaattatgactacgatcgccgactgagtcattcccaacgatattcttcgttacacggctattgcggatcaagatcgacgacttacgaaatgttgttccatatgattatacccctcgctgtacgcatctacaacgatcaagaattgttctactcgaagaagtcatcggcttcctcttccacatcctcgtcctcctcggcagctacatccggcacgccgccagcctgtttcaacttcacacctgccgccaagagcgacttgttcgttcggcctgacccatcctctttcaaggtctcttccggtcgcagactgacaccctgctttccagcctcggtcgtgtcctccataagcgatttgagcttgttcaagagctcgagtcgggtcacggcaggcttgtcctcgatcgcaggagtcaaatggaggtgctggggcaaggtgagctgacggtcctcctcttctgtaatctcctttccctcagtggatgtcgcaaagagagcgatgtatttctgcgtcatactatgacatgacgcagccgtcgatgagcgatctggagcttcatcgaatcacgatcgacgcggcttacgggtaatgcaggatgtagttgagcataactcgagcttcaaacagctcaatctcaagccctttcttcttcgtctcattcgtctcgctagatttgataccagactgagcccgtttgataatcctcaagagcttcttgcgttctgatgggtggaagtgcgcgatgtcagtgggtcctcagcaatgtcgaaagcgatcgtaatggcctcaccgaagaagcgaacctataagatagcacgagatgagttggagtccttttctaaagagtgcagcagcactgaccatgtgatatcgttcatgattcttcttttcgacgtttcccatctctgccttgcgcaagtctgccttgagactctccaaccgtcgctcagtctgcactttgagaccaggttcgataccttccttctgcagaaatcggctagcttgcctgatcagggctttgatttttgacaccccgagcttgctagtatcctgattccgggtttgaggttgctgcttgcccttcttcgtctttggcttggaagccttctggtagggcttattcctcttggaggaagaggcttcggcgttgggaggcattctgagagttctcgcgaaaaggtggtgatgtcgctatgtgtcagggaccagaacgtagttgccgtacattctcatcaagtggtgacgatatgcatcaagaaagtgaatctggtcctactttgagtgcgagatgtaaactctttactttcgctctgattcttggggccccgcgttgacgatgtgtgacaatcttgtcacgtgaaactgtctgagcggtcgatctggacaagctcatatcaagtatgggtcatgatatacagtagtagattacaaggcagaggcaatgatcttcaatgaacgcacaaatctcttgtcgtttatagatctcttaccaacgatgtccgcagcctctcgtccacccatccgcatccttggcttatgcgggttcagccagaataaacatgtcatgcatcagcggctcgggtttctgcgaaagccgctcaagcaccaagtggagttcggtgagtatctaggatgacttggaatgaggtgaggtgtaagcaggtggctgaatttcggcaggcgcacgatatagattgcttcgacccgcctttcgtaatcgaaaaggttgactatgcaacgggtaacacaaagtttgcggactttgattcggagaccacgatggacgaggacatgaccccggagaccacgcccaggtcagtctgtccgagtttgggtttggcgtaacacctcgctgatgatagcaagtagagcgtggtttcgctcaaaagatgaggaggtggacggcaagacagtcaagacgtatattggtaagttacggaacaggtcggcgggcgtctagaatggccgagctggatctgatactcacatatcactgtaggcctggatcaagctcttgccgaattgcacaagtatctgatatcacaggagactcctttcgatgtgagcgataacaagccgatcttgccaagtgctgcggcggaccgctgacgcgcttagataaggccgtattcggattctcccaaggagcttgcatggcagctctcttgaccgccttggtgaggatccggactaaagctactggaatcactgcctgaccacccagtctgatctgtttcagcttgagcgccccggactccactcaagctttcccgcccatcccaagctcaagccattgaagtgtaaatgctgtttgaggacttttgccgaggcaggtcgtgctatcactcacatcagcgcttacagattgcgtcagtgttggcggattcatctgcggcgacgaggcctatagcaacttttatcccatacaaacccctacgctgcatatcgtgggtctgaacgacaccatcgtcacgccggaacgaagtcaaacccttattagggtgtgtgacgatgcgcgggtcgaaaagcacgacggcagtaagcatctccggctaatcacaaccaggcaaattcaagtcttgacgccagtctccgaaattcttcctctaggtcatttcattccttccaaagcgaattggaagaatttctttgtcgcctacttgacttcttttacagaggagggactgcagggcgatgttccggggccgtcatctcaaccaggaggagccgccagcaccacagctagcgcgaccacgacgagacccggtacacccgacctgccgacgggcgaggagaagtcggcattataacgaaacaaagggttgcgcaagcggaaccgaacctgttgtaacctgcaaaaggcaatctgcgcattaccagggttgaaaacgatataattgattgtcgggtatgatagatggtaaggttgatgaacgagctgcgagggcgatttacaattcgacatccgcctcatcgtaggcctcgttgaccagtttgtagatataagctggcgagtggtcacccctgcgatttgtagggtcagcgcgtgatgctccgataatgcagcggtcgcgtgagccttactcattggtaatgaagagactgatgagttcgggcttgatgtagtcgtaaaaggggtttgcgacgtcgaccttgtccaagaactcgccttcctcgaagctaagtacttggcttggatccccaaagtccagcgcggcgggatcattgtacaagttccaggtcggagcgaacttatactgtccggcaacgaccacaacaggtgtcgactgtgctcgtgctgcgacggcagccaacagggatcctccaatggcaaacaatcctccgttggccaagacggaatgggcgcccagaatgaccttggtaacacgcggcatcagggcatatatcgacgaatctgggactagcaccgtaggaatgttgtgtttcgctaatgccttggccatcgtcgttcccagacgcctgaaatgaggagcaatacgggtgagactctgattccttttgaacggcttgttctgctcacgaaggggagctttcagcgcagatgacggtgaaattgcggtccttccatgcgcttttcaagaaagcttctaccgttttggaatagccaatggtaaggatgatctcactgtgacaatgaagaagatttgcatgagtattgatcgatatcccgaaccatgtcgccaatccgatttacgagctgtgaatgtgttccttcgctccctttgcgcacgtctcatgcgttgtttctatctcgtcgacaacctctctaatggcgtccaccagcacaggcttcatttgcatcgctttttgctccctcaatcttgcattctgtttggctgtcattccgctggtggccgaccggggttggcgagggctttgaggaggagtttcctgcctcgcgttgggcagcgagtcaccaagggctgaaagacccggaaaggagttgcggtggggttggtacgatccagcagtctcgttttgtgggacaggcgagaaaagagagtccagtaggggtccaggtgtcatcatggtcgtttcaaggccgaataggtttgtagtgcttcccgctcgttccaactgagcccgcgtgtgcctcatctgaacaaaggtggacaactgcgtagcagccggtcgagcttgtggcggtgatgcatagcccgtggagttggtatatgatgaaggagatccggtgttgtcgctcgagaagaaaggagatttgtttgaagtatcactcagccagtggcttgcagggacgtggatgccaggtgttggtggcattggcgtgccgggtattgaactagtctcatccctcaatcccgtgcgcagatcgaggccgtcttgctccagctgattaaggtatgccgctctgtattcttctcggatcaatcggagcacctttcgaacgatgttgccaacagccagctctgccaatcgcgaaacacagctcgtgtaagccaaggacgtctcgcgtatctcgtttggggcacgaatttaccttttggattggctgcgactagacgcttgccgacggctttgatctgctcgagcagttgctcgatgctgttgtaccgggcagagccgacaaagcgatacagcaactgagccgtctcgagagccgtctgcctcgaagagatcaggtctctgagagagcatctgcctcagtatttctctaatgagtatgaggccaggtttcggagacttaccggcgttgaagccgtaccactagctggtcaatgttttggttgatagactgtccggttcagcgcagatcagcctgagtgagctatcgatcggctctgctacctcaaaccacccaccattgtttcgtgaccgggtcaaacaatgcttgtcaacgtctcagcgtgttgctgctgctcagctccgtagcgtcgtcgagtacagggtgaaggattacaagtttgagatcataagctttgacaacttgacctttcagctttcgaatatgctaaccggatgttcccgtggaagcgcgtcttcactttaagcgcagccccatcatccattcgccaagggcgggattgcggggtttccagccatggtcttaacgaagctacccggcaaaccgaggaacgtgaatggagaaccgaatgtgatctgaatagagccctgccatagcctgtcatactcgcccatctatctgccagttgcctgtaaaaaacgttgtccatccctgttgactgcaatgataggcgagcctcgacggcggttcgcgcgcggtgaacgtcatggttgagattagattccgagaccgggacacgctggacagacccgttcgaacggtgcaactactgggtcacatagcttggtctacatgattcgaatgccctccagaccggagctgtccaatctcatacatagattcggattcgagcacgtcagtcaaaatgaacatcttcaggtttctcggtacgtgtcttgcgaggagctagacgagggatgctagttgggacgccccctttctcgccaaagggaacgagtatgacacgaacgagactgacctggttgacaatcggattcgacaggggatatttcccacctggcgtctatctttatcttggtccataagattcagacgtcaagatcatgccggggtatggacggaccggaaggtagcaagcggtcgagctgtggactgacattccctgtcgacgtgtattatatcgcaggtatctcattcaaaacgcaagctctctacctgaccgtgttcctcacccggtatatcgacctcctcactggcccctggatttctgcctacaacactatcatgaagatcttcttcatcggtagttcggcttacatcctgtggttgatgaagttcaagtaccggtgagcatggttttgagcgaggtggtctctgaactaaaagtggtgtggctgacgttcgaatctgctgtggactggcatgtgttgcagaccgacgcacgacggttccctggacactttccgcttggactacctgatcccgcccgtcgccgtcttggccctgatcttcaactacaaattcatcccctccgagatcctttggtccttctccatctggcttgagagtgtggccatcttcccccagcttttcatgctctcgcgaaccggagaggctgagacgatcacgacccactacctggccgccttggcgctataccgtggattgtatattcccaactggatctaccggtatgtcatggcggacagcgatcgcttgacctcaaccctgtcgctggagaggctgatagtgtacctcgtattaccggatttcctcgccataacagatactttaccgaaggtgcctatgatcccatcgccgtggttgccggcttgatccaaactgcactttacgccgactttggttatatcgtgagtctggctctggagtccgtcactgaatgacgctgacgggattcgccgcataccataaacatagtacgtgaccaaggtgttgcgtggccagaagtttgagctccccgcttagtgggaccaaggcatgaaacgtgacagccgagaggaaatttgtccagtccgccgtgtaaaagcacgcgaaaggagaacacgacctcgacgagtctatagaaaaaggcttgcttgtctacgcatgtcgtttgaccatgtttatgatgagagaatatgaaagagacgcgcgattgcgaaatggtgcaagtcggtcgaagacggggaatggatttgatgatgatgatgatgatggggatgttacgagattattgtcgatgacgagaacactacgtacactactactactgtgtacactactactactgtacgtagggtgtcatcgacgcgttcagaattaaatgaaggcagaagggcgaaggagcaggggcaggggcagggggtgcggggtgggatggtagcgtcaggggttgggacatcgattcgggcgcgtgcgaggtcgtcaaggtgggtccgctttctcgagttggccctctgccaccgtcatacagtgattcgggtgggcgtccgagctgataggtttgtactttgggacgttcacagcaaggaccgcaggaacgggcggcgctctgtatcgaccagatggcagggagcaggagcctggtgacgggtcatatggaccgggtcgtctgtctctgggacgcgagggaatgtaagtatcgatcccttcattgacgaaccttgccctgaatccggcccgcatgttgacctggattcgctttgtagccgcctcggtcgtctccctcaccctaccgacgccagcggccaccccctcggtgaccgcccacccgacctcgcatttcaccctcgccacggcctcgtactcgggtcacctacaaatctgggacgtccgatccccgaaacaagccttgttcagcgtcaagaagaacccgagaaaggacaacaagatcgtcggaggaggtacgggcgagcggttgttgagcgtcgattgggacggagaggtcatgatcgccggaggagaggatggcgaggtcggcgtgtggagcgcgagaggagagtaggccgagatgtcggtatccaagggattaatgatagatgtatgatggttctcggccaggtatcaatctcaaggtccacgtggttttttagaagcgcgtggaggcgccgctgattgaactgcgtgccgcagagctcgataaaccgtcggaaagacgataatcagagccgacgccgttttgcaactgggctctcctttgaacggatcacgcattccagtgcggaaatgctcatttgtatgtctccccagtcgcgtgataaggctattagggctttccgatggttctcgagaacctggcgcgcactcgtgctacccatactgttggacagcgatcaagcgttgagacgagagacgacatcagaatcttcgatcgcaggagtaaagctacgtacgtggcaaaacagggagcgcagctacatcatgggtagtgatccttctggtacagagattcataattctgtatgatttgacgatgattaatatccgtggtgtgccattttgctcacccctcggtatacgcgatcaaaagccggtcaaatttcatgaaaggcttatatagtcctcctttgtttgtgaagcaatatgaagcgtgtgttgccctacaaggaaggtcgcgaggatagcatgattgtacaagtacttgtgcgggttcccacatttaaggtgtacggatggctggacctcagcaccgccgagacgcctagcgagatcgctcaactctgcctaaacatgcctgaagacgttcataccacgccatctgctccggaacatgtgaagttcaatccacgtttgaagctcgataaagacatgctggaattcttgaacgaagttcacgaagctctcgaggctctcgaatgcgatgattggccaagccttccgaggagtaccaaacgcgaaatgcaagcggaacggggcttcgttttctacgattggacagacgaacaagccgacttcctaaggagtaacctccggctcttgagatcgacatttgtggattcttgccgaaatatcattgtgaagaataacatcgtcaagagcacggatgatatcgctagagcgggggctgggcgaagtcttctctctttagatcccatgtggctggtcgaggatgttgctactagactgccaagcgaggtcgacctttatctatatcttgtactggctgatggcgagggagagaagcgcgcaggaatccggatggcttcattctggtacgatcctgatccaggctttgacaaccctggaactcgatcgacagcggtaagcgatagtcaccgggacagtggctgtagcagcgaaatatcctcaaggtatacgagagcttcacgaacttcgcatagttacgatagagaagccttctctagtcttgaaatagttccagaggatatggcaacgtgatcttgttccgaaattctgcaagaaaaagctagattttctaagcagtttcggctagatatgccaggcggcaggaaatgcgagcgacgaacgacctcgtagcatacgtagtgccggacggaaagtcaacgttttcttatgcaaaccatctcctcaatctcgctacttttcgcacgaaaataagtcacacacaagccgcgttgtgatgtagcgtgcatagcgcgtgtataatgatcccacttgagggtcgagattgactttgacctcgatctcgttcatatctagaccatcagatggacgtctatttgcagttaggaatatccttgcctgagtaaacgaaacagatttttgctggttccaactagacctggccatttcacggctccgatcgtgctgatagatactaggacacactgcttacgcaaatatcggacctcgcgctctgtccatctgttcataatctgcaaagaagagcccggtctttctgtgctagacgaggatttgttatcgaacgggcgggccgaactcggaaagcaccagcggcgacggtatgatcccatattgaggagttttcggtcaatttcctcgcctagcaaccgctggtcgagttagcgctagaaacggtgcgctaccccgctcttcctttcatctcgttactcgttgtaacgccttgccacgtgacgagataagccagctacgtgacgcaattcgtcgtaaatataattgcatgacagcatggcaggctgatcagctatcagccataagacgtgaaacacggcagatgcgcagtcagaggtaagctcctttgtctccacaaccgcgatggccacaaatctggtgatgcctggtagtctcgtcataccaaatgtacatatgaaagtaccgggccacatacattggacagtaccgcctagaatcttagattggtctgatgttcgcatactcccgaacactcttcgaaggaccttcgtgggctgaatatcgtatcggcaacccgacctgcacctcatactctacatccacgatggccccgttgtcgttagaaaagccgattgcgaaactggatttccaggactcagattatgatgaatggacgatcaagctccataaggctttgtcgatgatggcttttgacgactggtctcaactacacgagagaggagaggctcgtcgtagttcaagggggccatcgatcgcgtatcattggcgctctactgacccagaaaattccttgtcgagggttttactcgccgcaaatctcagatgggcagattgtgtccacctgtgtgaaactttgctacagcgtttcctcgccgcacagggccctcaattggccccaacaaggtccgatacagtcgaattggtctgggatgtgggacgcacttggagcgccagcggatcatatatcgtcgaattatatgcggaatggaatagcttcaaacattggatcgcaggattcaagttctacccccctgctacagcgcgaccgatgggctttgtcgtcgaggtggacgaggaggagaacgaccctggagttgttggatcaaccgttactagcgaacaaagcgcttcagagggagaagaaacttgcaatcctccccctatagcaccgagtttcgaaactaccgcaggatcgcaaacgacgagcggaaacactggtccttccgaaaagattctccaggagctcaagggggagcctagcttgcggtctacttttggatcgttccacctcaattgatagcccggtgatgccaataatgtttatagattaacgtgacgatgacataagtgatggatgactagattaaggaatctctgcaatctttgacggactttgctcgaaaatagacgcgagtccactgtagacatctatacaggcacgtgatggcatcgttgagtccgggatgccggctgcgaacccagctcagaggagaaagtcatcaaggcaaggtggcttcagcctgactgcgctgaccagccgtcgccggcactcgtcgggatttctatctgagcagcctggcacctgattgactacgcggcagacctaactgtccgaacgtgttctgtgtcgagatcatctgcggctcccaccgtcacccgaaacgaagaagctaggatcacgaacgcgaacgaataccaacagtcagcactgatttaattaccccgggacttccctttgtttaagggacttagtcacgcgcaggcagaatctatggcgttacagtatgaggacgacggacacatactggcaagatgaacttttctcgcactttcgacaatcgataacgccataagataccgaattcgcaattcgtagttctcgcgagtcattgccgcatctctgcggcttcaacctatgggacacctcctttgactgggttgatgcgagcagccgtaaacgatcatggctggaggttcctcacgcttcgagccgagatggggagtttagtgctgtgtctgcccaatgtaatcttttcgcccctcacgtgcttgcttcttcaatcgccctcaacacttcgagcgggtggtcacatcttattgccaatcaaatgcagaacatccttttatgttgggcaatcacttcgtcgagcacgtcattcatgtagaaatgcgtggagggtggctgtctcgtgcttcccgagtatatatagtcgagctcttctacttatttcctcggtgggtgatggttgatcagaccaaatcaagcacagaagacgcacctaccattcttcgcttaagatcgcatcggaacacaaagtcgattgcacagcaacaacatgagccacggagaacatatcgaagacgaaatgcgtaggatgcaggccaccgtagaagcatacgagagagagaaaagggaagggttcgtttgcttggctgaacagcggaggagagcccaggttcagcagtctccagtgaggccacaaacgcaaacttccgcgccggccagtactgcgggaggatctgagtgggcaaaccagcctcaagatgctgagatgaccgacgctccgaccgatgtaaagaccaccagggagggaagtgaggctcaaagcaccgctaactctgggtgatgggtctgacaccatggcattccttccggaaatacagttgtgctttcctgattccattcgtatgatacatttgcgatgctgctgttgctgaatgtgccgttatggtcgaaatgttcatgcctcaatcaatgtggcgcgactctcaggtcttcggatacacgtccaccggtagtctgaataacctacctgtcctaagcaaaatttcggtctaggagacgaaaccccatcgtaacctcacctcattgatgcccattcttcgaaggtctttgcctcacgaccggtcagttttgtttcgctctgtgaggaggggtgacaatcccaggaaagacatcacaaacccgcggactgcgagacgcttgaagtgtacgcatactcaaactggcgcttcgtttgagcgagaccaacgaattgtggagagaaaggctacgatcggatgacgcctagttcaatactcaaaagtctgcaagaaggcatacaagctggcttcacgcgccctgaagcgatgccgccagtccagcgatgcagaaccaatgggcaaattcgggtatcttcctttgtgcacgaaaccagattttaatcccgctctagataccccctatcaccaatatccaaagctaggtggaagagtgggttcacgcgggaagcttttcgatgctgccacttcgcagcctcctttcctacatgcagatcggtatgcgaatgtcccatcttgttaatcatcaatttctcacttcgagatttcatcgtggctgagaagtgaaggcgatgactccttctcgtcggtcttcgcgaatcttagtcatgacttccaggctgtaccaatcgatataatttgtctcggtagcacgcccatgaagcacctctgtgaatgcaagagttcggtaatggattgacccgaaagaaggaccgacttattcaatagtagatgaaatcgcgggagtctcatcggcaagccgtcatgagtttgtgtcgtgagcgtttatatccagaggaacgaccgaaacactctgcgcatggttgtaaagaccggcgtactcatcgggggatgcattcataatggcatctggaggtcaaacaaagccatcgggattcgaaacttgctcctctagcttccgggcattgcatcaagcgcgcatgatccgggaaggtcctatatatcggaagcaaaccagcctgaggtagagcactaatcatgacgaatcatggcgagatcatcacgtgatccagtcggtgaagcgcgatcaaaagtcagcccagattgtactgtccgagacgtatgtatatatgtagagtgtgtctgctgtcgccaggtcgcccccttcgcttgcatcttcaagtcgctgtcgactactttgttcagcagtcaactatcccgcaggccggagggacaatagcgactcggccatcacccgcttaaatacctgaaacacttcgtttaacccctcgatcgaccgcgactcggccttctttttgtttgatcgcgtctacgcgaaaccgaccaaccaactgccactatttctctttgtcactgaaaacgtcagtcattcttattatatgtcctgcaggacgccactctatgctgatgttgcaatcaccatagtgaccacgccagtcgtacctataatcattctcagtggcgctagtccgaatcgttgaacgaccggaagcttttctcaccgacaggagacaggattgtccacatttttcaggacctcgtttgagaagacatgaagttcctccaagcctcttgctttgtgaccctggcggtcaccgtgtggtttgaaaactgcttcatcccggtcgatgcctgtaagtcaaccttgtggctctgctgcacgcgggcgtccttgattctgatatctattgatctgccgcgtgacttagctcctctacagacgaccaaccccagaaaacgacatgaagcggttgctttacatctacggacggccatcaacgacacccaacccggctcgaagctgaacgagaagaggcaggagtgcgagtacggtagttggagatgtctggggcaggatctgcagcgtcagtgcacacgtactcgtagagcggtcggcagaagcgagaaactgacatgtcgactgactgtgacctgtacaggctgctttggtggtcagttcgggacgatgataacgtgtgctgcggacgaactgtgctcgaccgaaggtggggataccggttgcgtctgggcgtggcaaaagactgcagaggccggagaggacgtgaatacgatccctacagctccatcgactagcagtactgcctccgctagcaccggtgtgacctcgacctccagctccaacagcatttccgggtacacggtacctcctccaacaccgaccacgccaacattcacttggtccgaagctaccacatatgcccaatcgcacaacctctccaccctcgtccccgagccgacatctaccccgcttcccaacctgggtacggcgcactatgtcatctactctgacgcctggcttaccgagatgccgcaccagtcggccgtgcaagggttcaacaagttcatcctcgccttctggttgagcgacaagggcccggtggacaatgccgctttctgggaaaagttgactcaggtggaacagttggaggtcatcaaggggtacaaagcggtggggatcacgttgatggtctcggcgtttggcgctaccggtgagttcctgtgcagaagatgatggtctcgtacacatcgcttaatcatgctggatggtggcgaccgattgtctcagacaaacctatcacggccggacgagacccgatcgcactggcccggtccctcgcggacggggtcaggaagaataatatggccggcgtggacatcgatctggaggacaacgaagccatgaacaagaacatcgccatcccctggatcgtcggtgagtcgaagcgtggccggacccttctacatcgagatgaccgaattgctgaatgcgccggaacagctttccagaaggaactcagggctcagctcccgagacctttcttgatctcacatgccccgcaagcgccctggttcacttcggcaaacaagtggcaaggcgggtacctccaggtcgacagggaatgcggggacggcatcgatttctacaacgtgagtctcgcgactacctcgtcgacctattgacaacgtaccagtgccgaccgttctccccttccttgattccctgctcctccccgtcggaaccgaagatccaatggtataaccaaggtgaggaccagtatcacacctgcgagaccctcctattcgactcgggcccgcaatacccagacacctcgggcttccagatccacaacgtcgggagagtgaaactgaacaagctcgtcatcgggaaaccgctcacccgcacgggggcggcgaacgggtacatggatccgggggagctgaagaggtgtgtagagctggcgagggggaaaggatgggatgctggtgtcatgtactgggagtgggatcatacggctcaaagtgcattgagggcggtgctcgacaagtgagaagagtgtggacgggggggatagtatatatctcatcgtttgtatacgacgtgagatgaaacgatcacattacgaaatttacgcccgggtgtttacgacgtgaagagattcgtgtacgatcgttgtttgcacatggacacaacggccagactgggtcgataagagtcgatatcgcgacgtttcatattctctctcatgattcttgttgtgttctgtgggtttcacgtcgacctcgctctaagtagctgtaggacgcgagtaagaaatgctactagctacggctacgagatgatgagatgcgtatcggtgtttacgttttaagatccccggatggctagggtcagtcagctcgtgacgcgcttaattgatcagatttaaggaagttgagagtgaccaaaggggatcgcgcttctacttgagcgtgtaaatcgactttgacgttgtatcgcgcggatgtaggtgagcccgggttgggctggactgggccgcttcaacataggtatagttggatgtccccagtacagccacgaagattgccacgcggcgtatctctccggtgtccggattaataacagggaccgtaggtgtttttttttcaagcagaagacggcatacgagatgagcgctagtctcgtgggctcggagatttgtataagagacaggagtgtcagcgtgtgggaggtatgaaatgagcttgtcgagtcgtttgaaagtggtctagacttgttcggatcgaagcttacagatttctacgtgtcgagagcgatatagcgatgggatgtcgttcccgaattcgagattgtaccgcgtttccggtacggtttgacaaacaaatcaggttcaatccatacgtcgtggagaagtgacgaggatgatgtcgagtagcacgagtgagtgagagagagagggaaaaagacgaggatcagctatcgaggtattgtttcccacgtatatggtgcggtaacgaatttccccgctccaccgtgccaacggacgaggtcgaccggggtcgttctgcgtccccagaccccggtgcgcccttgtttgttgcgggatgtttatgaaagccgcatcactcaccttttatgcaagaacctgttgatccaaggtagctcgcgtgtaaaaaggggtggaatggaggagtgatagttggtgtatagttgttataaagaggatgaatggatgacgggccccttgcccttgcccctgagctcctttgacggtcgacgagtctctgctctcgaagcgaaccggcggcaacagccaacagccaagagccaggctggaccccgccccccgctttcccccgaagatcagccagcatcgagaagaggttggggtggggatacacgggtcagcagatcaaaagaataggtcgcacaataccttcaaaggcatatacatgaccatcacctgatcatatcatcgtattgtacgtcttgcgaatcccgacgacaccttcatcgatctatccatcgtctccacccagcaccttactcaccctgggtcgattgccgcgcgtgagagcgagccgagcgtgaaccgaatcggatccaaatccaaatcatcatcatcacgagtacgtgaggactcgggtcgcatctccaccctcgtatgatcatctgaaacgtagaggtggacccccaaattcgtacaaactctgatcgatcccgagatatcattgattctcggcctatcgtaattttaccatgcgtgttccaaacgagtcgacccgggaatgtatcggcttggggggtggcagtatcatcagcttcggctgctcaaagggtcctgaggaatgatcacatgcccgtagatcttcagacgatgaccctcgagtcgtccgagatcgacatcgcctggcttgttttacaacggcatgggtgaggctcaagttggtcgtcgggccggatcaggtcagatcagatggacatccgggtctaccctgcgatcgcctttatcatggtaacgttacttagcccagcaagatcttgcactgtggaaagttcctcgccattctcatcatcaacatcctcaccatcgattgatgaaggcacccgctcggctcctcatcgagaagaatgcatataaccgagactttcttacttgaattgaacaagtatgagaacgggaactacccatcagcttgtagatctgatcccttggttgcagacgagtcgacgtcgggtgtctacgatcgcctcgtcctggcctctctagtatctcccttgtaagacgataacgtctcagacagatacgtgttcggtttcatattcagattcaggagtatgtgtacactctgtctgttgctcatcaacaagagccttcacagcgacagagaccctcgatcacaatggagcgttatggaagaacctgttctcaacctaaagcgcctgggttcacttctcttgagaacaggccagaccggacgaggctgaaaatatacatcgaccgcgattataatctgtttgaccgagtcgaccgacaggacgatcagggtgcaactggtccagtcaagagccgtatacgagtacatcaaagcgccatcgtcacagacttcggtccacacaggtgcagtgcacgggtcgacgtcaacgaaagttgtattggggagggtttggatggtaaagcacgagtcaagggcggttcaaccggtgaacagtggctccgggagaggcaattcggaaagcgctgggtgtcagaccctgaatccgtggcagggtgagttaagacgaggtcgggcagggttaggggtaagagctccctgccttaggcgcccccttcgattctactgttcctcttcctgatgccgcatgtctacctggggcgatacctatggacggtttctgatcgagatcgccagcgcgaacccgccgttccgtctccggacgacctcggcgacttcgttaccaacatgttgtgaaatcgtgttcgtggtgtcatcaccgcggtgtgcgtgaggttccagaccatcgatctgcgcgtgatactaccccagatccgtcaccttgaatatcgttacatcgtcttcatgtcccaaagatcgctctcggaccgttcgtgattcgttacacccaaaattaacagcctcttggcccccgagaccccgtgttcatcgttgttgaacgacctggggaaatcaacacatcgaggatcaggatcgagatcagcgaggccatccgggactggtacggcaagccagggcagaagcggccgggatcggacggggtcggacgagaccgggcgaagggggtttagagatcgcttacctggatattgaaatccttttgaaacttttgaaactcgtcctccttggtcttgtacgtcttgaccagttgttccaatgcgttctggatctatttcggtggcgatgaggttagagattgccggatcagcgagctattcgggcaagggggcggcgggtgttgcagatagagggtggaacccgcataacgtccggatctgtcgaatgacccatcaagtgccttggtaggacctcgttcgtcgtctctcctccgacgaggtaccggatcaagcaggccttctttcaaacaccagtcgaccgagcaggaacactcacccccctcaagtttcccttcaaatcgggctccacctcgctcactgtcctctctaccagtacccctccgatgagtcggaaacattttctcgtaggttccgtctggagcaatggagtgagcgtcgagagtaccaagctgtcgcgatggtgacgatggacggtcagctcagagtcgcttgtccgcgatgttctacggggaagagggaaccagagcctcgtcttcttgccccgaaacatgcgacgcaactcttccacctctggtgggtggccgtactcactcgtgttcctcgccttcttgctcgagctctcccatcttttgagcgagtgcggtcagctcgttcttgtattgcgtataccgagcctgtacatcggcgggtgcgggttgagcggtcttgggtggggcttttgatgacatgatatttgatttcccgagtctatatccttgtatgtagctagaccaactagactgatgataggcctggtagctgagaatacattctgaatgacaagcaagatcatacccatcatcagaccagagctgttgaacctgagttcttgatcttggactagtcgttgaccgtgatttgaacgccaactacttcggatcagaccgtcacaaatgaatcgaaatgcatcaattggtggtcaagtcgaacagctgagctctgttatacccagctcggaacgtcaagttaggctgacatgaatgctgacatagacaatggtggactatcgagtcactcaggtctggaagacgctccgttggaaacggcgctcgacgccttgctctccgactacctcgaccgcctggacatcctctttcgagcctattctcacgatcgacatgccggcccgagcacggaagcgcaggctttgaagctacacgatgaggcattagagagaagacacctggtcgggttgtttgagaatgaaatgaacgttggatcctctgcccgcatcaagatcgggaacgatacccatcattcaaccgagcgtgacctggtctccttgcccgctatcctcgacttcgacgacatggagatggagaattggaaacgatggcgtccagagatcgatgaaactgtgctcgtctacctatctgtcgagcgcggatattggccaggcaaggtcagactgtgacggcagctagcgggttctgatcggagagctgaacggcgaacacctctttgcagatcatcgatttggggtatttttccaccttggctcttccacgtatacctcgtcatcgtatgtactcagtccgaatctatcctacaaaacagcacccgtgagtcgtgctttgactcgggcatgagcactcttctctcagccaggctgatacctcgcgatacccgtcctcagtatcatcacgatcaaatcccacatcgtaccactccacctccgccccagacctccacggaacgccccatctaccctcaccaaagcatatcgaaccgccgaatctcctcttttgtacgatatcgaagccctcggcctcgaagtccggaatcagcctggttggggtgccgatccgacccgacttgagatgaacggcgggacgtggtacgaatggaaagactggatcgaggatcaagcgcgagtcgagggttccatcggacagaccggacggtctgccgggtcgatcgaatctgatgccatcgtcttgctgaatgacctcgaagggagaggatacccggtgttcacctccctccccgtatcctctgctcgaccgcccttgtccgctcgaccgagtttcgtggaccctcaagctcctcgtgcaaattttacaaagggggactttaaacgctcccggaaacgtctgatggaggccttgcaagacccgatcatcggtccggcgttgaataagctctcgctgggagacgtctgtcgcgcgctcatccccccaccagacccgaccaaggatccgtttagcgggctcgcacctgataacaacaatgggatatcagtcgaggacgaacagatccggtcggaagcgctcgatcacgtcttgggcaagaaacgcaagcgtggaggggtgggcaatgacgtcgatgatgacgttccgatgggctttgtggcccgctcaacggagaggtcggacgacaacgatgacgaaggatggtccgtcgtcaaacggaatcgacatcgataagcatctacgatgcaaactgtactgtacgagtgtatgccctttgcaaagacgcttgaggtgaatgatatctacaacttataatgtcaaagagaaatgcagagagcaggtcctctcgcgactgtgtttcgcgaggggcaacctccatcagagacagagacaccttgactttctattcctcttccggaagagcactatgcaaaggagagataccagtcaacctcgtcgcttgccaacgtcgcatgtacagcccttacctgctctcggatcgtcccgttgccggataatacacgctccactcgaaggaatttcccacaaaactacccggattgaacacgtggcatccttcatatgtgagatcatatcgctcgtacttgtcggccaaaatcacctgcacgatggatcctgtcagatgagagggttcgtgcacactagggcacgctctgtactcacagtcgtcggcataggatacaggcggagagcgtgatcccattcccatattgtcggccgtacctggataggcagaggtgatagatgtgtctgatcgaggatggtttgtacgagctgccaaaagcgatgcaaattgagcggagaacaggtcaagcccagtttgagcgcggtcgactctcacatatcgcttcatattcgcgccttctgtcccctctttgatctgcacgacgttgcgcaacatcctgcccatcaagtcttcccgaaaaatcacaatctcctgatcgaagtatttcagccgagcggggttgctcgtgaacgtcgccttggggaccttgcttcggatcggttcgacaaagctgtccgggatgggtggacgtggtagggtcgatgatgaccacgggtcggtcggtccgggtacaaagatgaattgcgagtgctgtgatagtgtcggaaagctagcgatagcttcggctagggccttgaatccggctgtcatcggaatgagttagcggtgaaagaggacgaggcgagagggaaccgctccatccgaacgtaccgacataggcgtccatgctccctgcgcccatccaacccttcatcgaaaagttgccacagagcacgaaagcatacggtcggaaatccgcctgaccgtacccctcaaacatcctcttgagcgccgggatcgttttgggatgatccagccagacgtccgagaggacgacaaatgagagctcctcgtgggcttttgatatgcgttctagtttggcctgtcgaaagcaaggccataagagggacggtccgggggaatgatcatgcggcgacccacctcttctttcagcgaagtcgcccctatccccaagaagtccacatgcccaaagatcgctctacctcgcagcccaatgtcagcgacgggcgtcatgtatcgagcacgcacggatcgggggaaaaggacatacctagccgcctccctcctctcgctcggtggatgccccatggccaagaccttgattgtctcttcggctgtgtattcgccttcgatcagtacgaggcagttctccgtaaagagtccttctcccggttcctagaggcgttcgcacgtggtatgggtcagttccggatgatcagacccggttggtgtggtcgagggattacccaccgcatcctccatatcgagtacgaccgtcccttccccgtcctccaaacatagtctcccttcggggtcgcgggagagcatcccaaagagcaaaaacagctgaccttgtcttccgagcaagtttctcgtcgacgttagctgtacagggaggcgagggtgagcggggttttgatttctccgtcaggagcgacaggcgactacggggttatccttactttgaggtaattagctcgatcgtgtcctccgacggcaggtggtgtaaagttctcgttccgcagtacgatctggacgaacaacaggcggggacagattgacgagatgaggcacgccctcaacatcaatcctgaccaccgaaccgactcttacctgcctgaccaaagcccaccgttccctgaggtacatcgacctcgagatggccggtccccctatggcaggtcgatgattaggtctgattccccggatgcaccaagccgagccaacacctccaaccagatcagccctctccttgtcctgttcctctgcgacgagcgacgagatgacgagacccgacgagcttcgtctaccatctaagactcacagtccgaacgtccccttgacgttatcgaacctccatccaggcatttcgaacgcgctgatgactctgaaatgagcgtccaccgtcatctcttcgacgtcgatcgattgatcaccctcttgaaaccctgcgaggtcttcggggtcgatatcggcgtcctctaaggccgaggtcttggccgagagggagtcgtaggctttttgtagggatgagagggagatgagcgggttggggtctgtgatgagtggaggaaggggcgtgcgggggtagggtcgcgatcgggtcagcgacgagaggtatacgggtgatggcacccgtccatagcctcgagctgaagctggagcttgatcaccaggactcaccctccccacgaagatactcctttgcccagagttccaacccgtccgaccattcttcctgtgggacttcaccctctgtcaagacgttttcgatgaacagcaacgattgggtagggagcgtcaacgagtatttcgtcgaaaagacctaagggggttgcgggtttagctgttcgaggtttgcgtcatgacgatggtaaaaagtttcgagtctggggctgaccttgacgatcatctgtctcattttagggttgaccatcttgtcaaattcgtatgtggtcgtctccggctagcctctattgattattgatcgagcggttcgaatgatggtcttgtctctggtcttgtctgttgccttttaagaaaagcgagcatgtctgtagaccgtgattcaatctattcagaccatctctctaagctctgcctagctacaccgacttgcccaatcgtccgtcaaagtcagtcagtcggtctgtcggaatcgaggtcgaggtcgaggtcgaggtcgaggtcgaggtcgaggtcgaggtccaggtcaaggtcgcgttacttctgtttccaagcaaaagacgcgtcgacgcgtacaaacccgtcagtgacaaatgaaagaagaccgaggaatagaccgaccatacatacgggtcgagtagatcagatatgcatcgacgccctggggttggctacaggttcaattcgattccgtctggtgggaaagaccccgtggtgggagcagcaagttccaatgttcccatacgtggtaggtagtaagggatcgtaccttatagaggggaacgagttgagcgactcgcacagtcggaaatcgatttgtggctcgacagccgctcatgggacatgggtatagagcacaaggtgccccgttccgcaagctattcttattattactacgtcgttgatgtgactcgataggagaaacgcgtgccacctgacggtgacgacctattcctcatctcgtctcgaaaacccttgcccagcaaaggggacatgaggcatttcgattgaacacggcttgactcgttcaagacaattggctcttgcagaaggtctgatgatcttcccttacgagtgatgattatacgacatggtcataagagagcagtactacgacaccacctagctaccatcaggacgccgaattactccaatcaaactgaaatgtggatatgatgtgtgttccatggcatgaccaagttcggaccgacttttctcactcccggaagtatatctggcgcggccttttgcctagcaattcgctgatttgcttccggcatcctccctcctacccctcccccggctctggtcagtcgaaagtgagtaaaaggtcgaaagtccggggtcgacatggttcagcatctggtcatgtcatgaaagtgtggtcgctgatcgctctcgggaactttttcttatcctctacacgacctcgacgacgacgaccccggacagactgcataccaccgccacccgctcttccccgacatccaccccaccccaaaagaacccctacacctccgtcctctcacgtgccggccccctgtatgaacacgaacccgccgtagcgtcccgtctgatcgcgagctcgaggacgaagaacttggtccccataaagacgaacatcagggggaccgagttgttgaacacgcccaggttgaacaaggtcagttcgtgtttgctcggggaagaggaagagggggtacggggttggagttggagttactgatgttgggttggcatcacttgtctacctacacgctctgcatcggggttcccttctcatctcgtcttacctcacctcgccttgtcttacctcatttcgacgacggcgacgacgacgacgacgaccgacatgacagggcgcggcgttcaccagggaagaaagagccatctttgggctcgagggcatgatcccgtacgaggtccatgatctcagtaaacagtcagtctcggtcgtcacgtcacacgtgagatacaggtcgctgatgacgatcatgctcccttcgtccctttccatctcctattcctcggcttcacatgcctacccctgcccgtacctctcactcgctcgggctctgcagggtcgcccgtgcctaccaccagctccagaagcaacccaccgtcatcctcaagcacgcctttctcgcctcgatgcgtgatcagaaccaagtcctcttttacaggctcatgcaggatcacctcaaggaacttttgggaatcctctacacgccaggtgcggccgaggctgtaatggggtacagttacctgttcaggaggccggtgagtcgagcgtggttccgcagggacaacgaggagggatgaagggggctgaaaatgtctttgtacgtttcccgggatcgcgcagttgggttgtttcatcgtgagtcgcgcaaatttgccggtcgcacggtcagacgtcggtcccagggctgaagatttctccaccccgtccgaccgccattcgtacagagtttccccaaccaagacgggatgcgcgcccaactcgagtcgcacgtcgaatccttggagaaacaggccgacctgacggctctcgccgaacgagccgactcgtccagcctcatcgacctcatcgtcgtcaccgatagcgaggccgtcttgggaatcggtggtacgtcccccccttgcattccgttgatgactcgcatgccacggtttcagggctaactagacacaccctgtgcagaccaaggtgtcggtggaatcaccatctccctctcaaaggccgccttgtacaccctcggagccggtatccagcccaaccgaatcttgcccgtcgtcctcgacccgggtaccgataaccacattcagttttcggacccgttgtacctcggatggaagcgtggtcgagttaggggaaagctttacgagtgggtggttcggcccggcgttccgatgtcgatcgcgcgcgagctgacgatagcgggtttctttggggttccctagcaaattcgtcgacaagtttatccaacactgtcgagaactcttcgtgcgtctcgccccgatggccgttcatcgctcgatcccgatgcaaacgctgacgtcctggtgccacattttttttcccgcagcccaacgctctgatccacgtcagtcatacggaattgattgctagctacccttcggaaaccccaaatgctgacatcgaccccgactcgtttgtcatcttctcgaccacagttcgaagactttggtctgcagaacgctcagcgattgttggataagtacaaggatgtcattccttgtttcaacgacgacatcgagggtgagtcgagaaacgcagcgccgagtcgggtccgggtcgctgattcgacgtcgtcataggtaccggtgccgtcgctttggccgctttgctttcgtgagtatctcgctccgtcggtgttcctctagagccgcagctgatcctcgtcggctgggttgctttgtcatagggctgtcggcgtcaccaagaccaagttgagcgaacagcgaatcgtcgtctacggcgctggtagtgccggtatgggtatcgccgatcagagtgagtcgtcacgtaccgtcatcaaggatggggggccaggtagctaacgaataagcatcgtatcagtccgtgacggaatgatgctcctcgaaggcatctccaaggaggaagccaacaagcgattctggtgagcagactataacgccctcctgtgctgctagtaatccgtcgaaaactgacgatggccacggcttggattaccaggtgcatcgaccgaaacggtctcttggtcgaatccatgggcaactcgttgcgacacgcccagctgtcttacgctcgaccggacgaggagtgcgccgactgggacactgctcatcccgaccaaaagggttactacctgcaggatggtgagtcgcgagatgcgaggacatcgacttgataacccgacgactgaaacgccgagcatggcaacgcacagtgatccacaacgtcaagcctaccatcctgatcggaacctcgactcacgcgcgagccttcaccgaagacatcgtcaaggagatggccaagcacgtcgagaggcccatcatcgtaagtcgagcgcatggccccgactggaaacagccgctgagagcttgtaccgtgcagttcccgttgtccaaccctaccgctcttgccgagtgtgaccctggtaagcaaagtctcaatcatccctgtctcggtcgggacctttgttgacctggctatccgttgcgactctgtagccgatgcgaacacctggaccgagggtcgagctctattggccaccggttcgcctttccccccttgcgagtacgctggcaagacttgtaagtttgggtccgcgctcggtcgtttgccattgatcatcgctcactctgcgtatcgcctgacagacattcccgcccagaacaacaacgccttggtgagtagattcgctcgtctttgacactctttgtactgacccgctccgcccttttcacagatctaccccggtctcggtctcggaacaatcctctcgcgagcgagacagatctcgcctggcatgttcatggccggtattcaagcgttggccaacctggcacccgctctgcacgaccccaacgcttcgttgttgcccgatctcgccgaggtcagggaggtctcggtccacgtcgctgccgccgtcgtcaggcaggcgtgcaaggaaggacgaacgcgagatgagactgtgctcaaggtcgtgaacggtcagctcggagagggattggaggagtttatccggggttcgatgtgggatcccgtaagtcgcaaggagtgttgagttccccggaatattgaatactgacgtctgaggactcgctataggtctaccgccccttggagttgatcgattagatgcgggaggatccagtcaagactgtagtagactaccagataccgagacatgaatcttgtttcactccaggctgtgacgctcacggggttagaggcgacgcgcggcgtgatactgcagcagaagtcaacggtcctccgtggcgaccgacattcagacctcttatcagcacgtccatcagcaatcctttttcaatgctctgtctttgcgagggctaagaccgggggtggggagggggggacaccggcaagaagcatcgcataaacttccaggaaaggcacccaagaagccgggactcggaggtggttctgcgggcacgcatgaatgtcgacccccacggggcgtcctatcgtggcaatcacgacgggagacgtgattgtttaagcggttttgaaccatttgtccttgtggctcttcgtatcagaaggctcaacttccttgaccttgaggtcaacgtcttctgcatcgatgtcaatgactttgtagactcgcacctggccatatcccagttccctgactacctttcagtatctctgtggtccagccccatcgttgacttgtccgtcgtcattggagttaaactaaccctggctatggcgaatcactccttcctttggcaatttcgtgaagctgttcattgatcttggaatgcttgtagaagcagcgagtgactacatgagcggtctcattcgacgaccatataattgcatccacctccatcgtgtatgttcttgatgatgcgagagcaagccaatcctgttcgtctttcaatcgatcccaaggatcggctggttgacgaaccatacagacagcttcgcacaggctgccttccagacgcaggcacgtcccaagctcagagctcgtagcgtttcgatggtatattatcttgataaatctctattcgtacaagaagactttcgaggacgtccttgatgaatcccacttgcgaagtgatgtcgctcgttttacaatacaatctatcccgttttcccggcaaatgactcggtccaaactgcgctgcagattacccagcgaggaggtcgtgcagttccttctgcatgcgttgcatctcggcctcggtattgacgtcctcctcggcctctttctgcacctgtaagggtaggttgcatcaaggtgatcagacacgtcccaattgcgagcatctgagcgacgcatgacacttacaggaagctctgctccaacagctccagcctgtccgagcttaccgtccgtcagatcgaacaggatcttgtccacctcggcgtcggcttcttcctcgagctcgtcatcgtccagcgcttccatcgtatcgtccatcatttcctcgatgatcccggactgtcaaaaacacgtccgtcagatctgagcggcgaggcgacaagtgaattcggagccggctctcaccttcatcatctccatttgcatctcccgcatggtcgcgctcagctggggtagcttgatcagctggttgctaactttcataatctcggtcgacttttggaaagccccggtaaccttgaccatggcttcggagttgactttgcgatcagcatcgcatattccttggtaccaacatgtttaacttacaagcttgatgctgcatctgcatctgtatacttcctaatcgagccttgctcatcgtcaacctgttcttctgcttgttcgtccgtacgacctctttggcgagcaggcgtgcggacttgacatcgttcttcttggccagttgtttgagcgactgacgagcctttgttgtggccagatcgagctgtgatcacgggcaggcaagggggtcaacacgtggaacagactaggaagccggatcgacgtaggcgagatgtacctgtctgatttccttgtccatctgccgctgttccgtccgtagctttcggtcccactctttgagcctctcctccggcgtggggccatagatgtacctgttgatactcttgagcatggtgacccgttgtcaacctttgtgcgttcactggttggcaagtatgggatgaaaggcggacgaaagggttgtgtcaggagagtcggctccgatgctccgacgtaaaagacgatgagctggaactatggagcgttcaagccgagctaatcaatttgatccatagattcgataccagataactgtgagtgtcatgagggtatacacatgtctatagagcggcatcgtcgttgtcacgatcatcgatgtcgctcgacctcctcctgtctttagcggaggcgaggtctggaccgcgtgagcaagtcgccgagcgcgctgcgtacaaacatatgacttaggaagatcctgtaacatcatgcatgccatgccatacatcaatctcatcgtccatgcgaaacagtcggggccacgatgtcacctcctcgcatctagagtttcagtagctaagctgaaaagtctactttatcaaatccgtcgcgagcatcccctatgaccgctcattgcccgtcgcctagatggccttgccgtcaatctcgatcctgccttgaccttcctgtagcccatactcccgctcatactgttccaaagtcgcctgatcaatcttgctccctccacaagcgatcaagacgacatttttgcgtcctgacggttggggcagggtctcgatcagcttggacagcaaccgttcgggctggtaagccgggaccagggcggcaccgcaagcgatctcgaccatgatctgatgatcccgattgaactgccatgtggccgaaccagagagagcgtcctcgacgaccacgccggtaaagtacttgccatgtcgcgtcgagctttcagactgtcgatccgacccggaggctgcgatgagggcgtcgtcgagtgttccgtatcgagcgtatttcttggccagcttcaaggtgagcgctgagcactttctggctcccatagacgtggcgagcgaggtgatggcaggcagcgtgacgtgagcctcggcgttgccgatcggatcctcgtgataagcgttcatcgactggttgaacccgtccgctccaaagtcctgtacaccgacgattttgggtcggtggacttgtccctcgggggagctggattggcgtttcgagatccctctgaggatccctcctaggaaaccacctccaccgaccgcagagacaatgacgtctgggacaggctgtgacccgtcattcttgctagcctgactggattgagccatctgctggtagatctcctcgacgatactcgaatgcccatcgaggaggtcatccccctcgaacggatggatatagactgctcccttttcagcatcgacggctttccgagcagcctggtcgcatgtatcccagacgggaccggcgacgacgacttctgccttgagtccactcagggtctgtttgacggcttcctcacacgtctccgggacgtagacggtacacctcgcgccgaggctcttggcagccgtagcagcggccaggccagcattacccccgctcgaacagacgaggtgcgctgatgccccgtagcgctcaacagctacctgacagacccttccgatccccctgatcttgaacgagccggaaggttgcagcgcgtccatcttgagaaagacgttgtggcccgtcttttcggacaggacatcggagaagaggagcggggtgacaatatgcaacgaggaggacgatgaagcttcggcggcctggacggcttgttcgtaattcgacatcgaggatggatttttggtcgagtcgaggttcggattgggagccgcagaccgagtctggtcctcgaggctagcttgaagagcgtccatttgtgggtgatgctatgtcgtagcctggcttgatcgcctgtcaagaaagtgcgtgctggtatggtgatatgacggttgatcgagactctggttgtgatcttgctcttgctatatatccagcaagacgacggggcaatcgaaacttgctattgcaaacaagacaggtcgacttgaacctgtttgtcacccttgactcatcgatcggtcgtttgattgtcgaaacgcggtcatcgccgaagaagaagttgctcgcaacctgctgggcaacgccgagtgaactttcggggggaaacatcctctactacaggctgattttgaacaggtcgtcgacgaacggatagcaccgggactgggtactgtataatatgtccttaaataggaagagccaaattaccaggactgacgtcctcgcctctcgcctgccagaaatcgtgctgaaattgactcatgttgagacggtgcttctgacattcggtacgtccgacctttatttcgtgcaaaatctacaactatggtaggccaccttgcaaacttttccgtcgagactgtctaagcgagtgtcacagatcatcaaccgattcaaaagataacctcccggatatcgacatgaagacggatttgcgggacgcttcactatactttatgtcggctgctagagatcgcgcttaaccgactacctaccagggcttgcctgtcctatccaactctcggcccatcgatgcgcccactcgctgttcagccgatcgtcgactgaggttgcaccgagaatgggtggaaacatgttggacttgatcgaaatccaatcatgcgtcgagtgaagtcacatacacaatcccccgacctcgagcgcacttgtcggcttatcgctgattttatactcatgttcggtcgccaggtcggcatggaaaccctcacttcgctcacacggtccctgaggtctcattccaaatttcgcagtgtcttatttcaactcactcttccgtcttgtgaagggcgactttgtttagatcagtccaagtcgcctttaacctgcacagcgaagggtgcaccaatgaagagacaaatgtagctgatcttgctgatgtcgataccgatgatgatttcatggaccgggtcgaccgtccccaagagcatgatctgcagatcctatgggctggatcgccaggctgaagcgacaacagtcaacagctagagacgatcgagcgcaagcatttcactggggaatggttacaacgggatggtagacgtgttggggctgtcggaagtataacgctgctcattttgcttccgtgatcgcctcgttagtacacctcatcatatatcatcttctgtgagcacatcatcatcgttgaggtcatcctgaatcacgtctttgagtctgtcaactatcaacggactgaagagccaagataagaccagaacagatcaaagagtatcctcctatcaatctcttggacaatcccactgccaaagacataacagcatggctcttcaaccagcactctcattcaccaagattggtcacggtcccaacaccttggagatgcaagtccccagctgtgtataagagacagtcttcccgccgtccatgttccccgacggtatccgccaccgtcaccccaggttccctcaccgtcatctccatcccgggttgttcggcctcttccatgttcatcacccgtttctccaccaagtagaacgattccagcgcccggacgctccatagcttgaggtactttgcggcgaggacggacgacgtcttgaacaggtaaagggagagcaaggttgggtagatgaaccggactagagaatcgccgtcagagcgagatgagctacgtttgccggcataccgtgcgcccccgtttctactcacacaacaaggcccctttcctctcttccagccccgacccgatggcgatgatcagcgcgaccagacccggcccgaatagaccggccgcgagccacttgccggcatactcgatgacggtccttcgacggtactcgccctgacggaccgtctcgatccatgcgaccgagtcttccctcgcgaggtcagactcgccgtaagcttgggcgaggaagatgacgatccgtcgacggagaggaggtcgatagtagatgatcgaggaaaagaggaaaccgaacgccctaccaaagtcgcacgcatcacccaggtcagctcgacaggatccgacggatggtaggggccggggggacggcagaggccagacaaggggctcaccaagcttcggacgcgtaaaagacgggcgtcatgtccgagaacccatacttcaaggggaaaaacacgtagagctccaacagcaaacccacgatcgtgggtaggacgataaagagggcgatcacgcggacgatcatcttccccactttgcgaacggacagttgggagacgctcgatgagctttcggcagtatcggtctctgctcgcaatctctccaagactgataggttctcccgctttttgggatcgtatccgagttcctggcgtaggttccgtacgttgacaacgatcgattggaccgccgtcacaccagcaaactggggaggagggtagaatagtatgcaggtaaacactcgcagcgctcttcctaccgatacgtgccctggactcacaaagctgtatccatcgtggacttgatatccgaaccatagctccgtcatccctcgaccgatgatgatcgggatgaacaatgccaacacgcaggtccacgcgaccgaaacccagagcgacatgccaaagatccagaaacgcaggggatagagtcccggcatgtaaacctgcgtgtaatcctccttgacgcgtcgatgtgcctttctgccgacgcggtcttgcaggacggcggtcaccttgccttcgtcggtcgtaggtactcccgaatggtcgacctcgacaaacacgtcccgtcgcggtttgacgagcgcgaccgaatccgcataaggtaccctcatttgcctgcctgcatatgtcggaagaggcgcacggcttctcgtgacggctcgtttcagcgacgtccatcgccgatgagcggcaaggagtctgcgctcgatcggaccctcgacctcttcctccttataccgtacgccataaaagtaggagctaagacgaagcattctggacaagccgcgccagtacttgtcgagcaggaaacgtaacgctgtgcctatacgcaactcgcgccaatacaaaggcacaacgaacagcatcaggatgaaatcgactgggaccgtcgagggcgtttctctatgaccgattctggaatcagcgaatgatccgaatgccggaccacatgagacaagacccacttgtagtaccaccgtaatggtaacaggttcacgggaacgtaacgaagggcaatgaagagacccccgacaggtccgacgagcaccgcaatgtacatgaacgcgctgatcatcagcttcttgagctgcagaaaggtggacttgtccagaatgtcccgaacctgcatatcgcgatctcaagcttagtccgagtcacccagggacgcgattgcgatgctgaacttacgggactgaacgaagggtcttgagggtcgcggatcatatacatcgcccctcgtcgacatacggcacggcatgaggaaaggaatttggcaaaggcgaacctgtgtcattccggtgttgtcagtacgctgctcgtgtaagaggcgagatactacacctacataaagagggtgccacacagccaatgagcgaaaaagcttagtagaggatgcttttgctgcaccgccagcctggcagatagggttccggttgggaacaatggcaaggcacacaggtcgacgatgtagcccatagacattgggaaaaaggccagctcgatgagcatgaaaaagccaagctgttcgacaagtcgtcagccacagatattccggtcaaattcatcggcatcatttatgctgaccttgagaacggtaccatgcgaagcggcagcttcggctatagatttgccgaagcggcccagcaccggctcgcccagagcagagaggaatgctatcgtgcaaaaggcatccacgtagcccatagcgacacacatcaatctggaggtcgcgctgttccctgccgcgagctcccgtgtaagcgctttgtatctcaggtagttggtgccgagttctgcaaagctgctctctgcaatgtccaagatccgggctatcctcgtctcgacaaaagccggcgaaatccttagcgcgtgttgaagggacctcttgagaagcccaagcagtgccgaaaggggaggtctaggctcgatcgccttgccagggaaaccagactcggttgattgcttcgtagggagtcccagaatgacacccagtggattgatcaacatatagtccagcactatggctaggcgactgatcaagaagtcggtcccagtggtgacgagtttcgcgactgcatagaggccccttgctggtaatgcgagcatactgatgtcgccctattgttcaaacggtcagcgtcgtctaagaaaaaagggaacgctcttgtaaatctcactacgaggtgtatccggcccaagacatatgggacgtggacgaagaccgtcaacgctgctgtcaggactagcacgactatgaaggtgttttgcaataggacgacgggaggtccgcgcaagcccaccactgggaagaccacgtgaaattgtgatttgagcacctgtatcggaagcggacaaccttccttcccgactcaccttccatcgcgccttcgatgtcaccctcgagaatgaacccttcgccctcaccctccatatcagcatcaaagtcattccacctctcctcgaccccctgaacaatctcgtcgtcctgaggccgtatccttcgagcctgattccgcccgccaccaccctgtcgttgacgccctactcttcctcttgggccttctggccgtaccggatcatcgatccgatttcggatttcaggcgggaatagcggttgctggacggcgggttccacacggagcgaactgtcaggacgggaaggtggtaattcgacttcggttggcagccaaaccgatcttgtgttctgatccgctgctccctcgccgctgcttccggccgtttgcaggctggggccggccgagccagctcggtcagcatcatcaacgttgaaattgaacatgaagtctgattgataagatggtcgaggcaagtgctggtccaggacactggacgctgacaccgcgcttggggcctctggtgcctgatcagcgaaatgtcgattatgatctgccacggcaaagtatcgattcctcgcctccctcatggcgtccaagttaggcgagtctggctggtcagcgtccagcgggaagacatcgtcgacctctgcttcgtcgtcgtaatcctgattgcggggaaatgcggctccttgttcccgctccagcagcgcggtgacactgccgttgtcgtcctctgattcatcttcccactcgtcgtcatcaccttgcccatgatgatgatggtggtcatcatggggtgtaaggttgtcgttgtcggaagcgccaagtcgaggcacatctgggccggactcgtcgattctctgttgcacttgcatgaccaatctctccagctcggcagtgttgagccgctctccgtcagcattcaatcctgtcccgcgtccacgccttcgatgccgccatcgtaccgccatgtgtggtcggaagtcttctggacgagcgggtccgcccatttcaggcgcgtctgccgctgggttgtcgatgggtccgttctggataacccattcccgaaccaggaacactccgagaaaagagatgacgatgataactgaaaggacctgcccttggaaaacgttggacagcaaagtgtcccggctgtcacgagaagacgctaaagatcagacttggaaggcgtaacgcatgtcgttgatagtttaactcacatgtaattccgcatctggtaccccatcgtcttgaaaacgagtgaccttactttcgggtcgtcgtagaaggtcgcacgaatggcccacaatccgtccaccaagccgaccctgcttcttggcacgcgatccgtcttggccatcctttcggccacctcggctgcgatatcatccgcatcgatgttgcccgtcgaaagccacgccgatatctctttcaagtcttcagtcgtctctgtccgattgaacacggggccttgagtcgagtttccgtttccgccgaccatcttgccgaccctagaaggcgaaagctaggtgagtaagtccgaatgatacagtgatttaggcaagcagcttacatggagttgcctcccgaaaacagtcctccccagaccccctttatgatgagcggcaagatcacgagccatgtgactgcgacgagaaccgcccatcctgcatagcccaatgcccgtagaccgtccttgaggaactgtaaaatcaaaaccgagagcggtagtgatggaggcatgtcaaccggatacactgaagagaatatccttgttagctccgacgactcaaaggaacgcaggttagcaaggacgaacctttcttgaacgagaaagcatggccgcagagttcgcaggtttttttgttcgagtggccgagccactgtaccagactaggaggcaatgcatgagtcctagaatcgcctactccaattaggaatcgtccttaccactcggaatgcacatatcggatggatccagagcacttgcacgggtggtagagcgggttaccctgctcggcttcggtcctgcacactcgacagacttcgctgtcatctacaccgttcgcaaagatatcagataccgagataagatcaattcgtcggctgatatattcaccattgtaatcggccatgttatttcgtacagctcaggctgccactttccgctatgtttcgaccaaatccgaaccaaacctctatgtcgtgagatcgatctgtcgtttcttgatcaagctatctttaatgtcgtaattgtccgcgttcgagccttcacaactctggaatacttgtatccacattcgacagcgtctaaggctcgatctttgtgcggacagctcagttgctagatgcgaatagttgttgcgatgaacgatcaagatcgacccggtcaggggtcaggttattgctcagcgcgagctgctgctcagccgagccggtcgtcatcgcggacatcagttattttcaaaagtccgcgagtcaccgagtccgcgcatcggcctctttcgatgaagttagtagtctaggtccgagtcaggtaacttgaatgtatttgatcatccggtctgcctgtccattgagatcttctgggtcaactgccgccactcccaagcatagatcttgaacgtgaaacagccttgacctccttctagcatagcgaatcggacaatcagcaatcatggttttgttctacacatcaaacggtatgcaaatccggatttcccttcattcgtccaggctagatgcttatatagggatcatctcaactatcagccgtgtcacctcctgcaacgatctacatgtacgtactgcggaagatgggatatagcccttcttatctgtagaataatggatattataacgttttccacgtcaggggaaaggacaaggttgaaagcaagtggatcgggtaccacatcgtaaacaaagatgaatcgtaacttatgtttcggttgattttgtcggtccgaatagacgaggacctgatcaagtatggtttggaaacaggtcagtctaggatcactgcatgatgacaagatttgcaacaagatctaaaatgaccacaaactcgcactttagatgtctggttccacgtcgagtaagtcgatctttacaaaccacacctcaggtatccgagttgatggcgcctcattcgattttcagcaagctctcttcggcgcatgtgtacctgcggctacctcctgatcttccttatggtgattggcaaaacctgccaccagcgctcgtcatggatctggcacagcttgtcaaggcgaacagtatcgaaggtgggttgagtctcagttcaacattcgtacaatgcggcgctgatcctaaagggcctgttgcaggtaacaagaagaacaatatcacagtgcgttgtcgacaagtcgcgtggtccttggctgtgggtcgatctaatagacataccgccaaaggtaatatacacaccatggagtaacttgaaagtgcgtttctaatacctatgagggacccgtttgtactgagctgatcggaactgatctcggttgacagaaaactggggatatgcctgtgggacaagtttccttccatcggaatgaacgagtgagtccctgtattgtcaaagtgatgagccgttgctgactttcgatcgtttcgtcgtaggtgaaacgaggtaccatccctgccaccacctctgaaaccgtacttggcgctctcgctaacccagcaatgtccgtttcatttccagtccacgtacccgcccgtgagaacgccattgtcaaccgactcaccaagaccaaggtcgagaaagaggtggatcacgaggcagaacgacaagttcgactcaaggctgaaggtagagtcaagaaggctgcggcgatcgagcaggtacgtccagcctgcagcacctgtcctatccttccggaaaagggagctcaacgtgacctcgtcctctttcggtaggagcgggaagcggcagcccaacgcaagatttgggaagaacagaaaaaggggaaacgtttcgagggattgttctccgaggaagcgtttgaagagcgggctgctcaggaagatgaggatggggacgatttcatgtgaggtgtgtccagcggtgtagtatcgtacaagcgcgggtcctgcatgctatacatggcgtgaaagggcatgatcgttactgtgcaggagctccgatgccgagcgtggcctttgcctatgtgcgccgattttaacactggcttaaatgcgggtgggtggaccacccatcgaggatgccctaggcttggccatggcgcattgataacgcttgcgagcgtgacacgggctttttggtgtcgtgacgtgaccgatccggtgcgagatgcctgctcgtaaagtcgattgggatggtcccgtgaaggccgtcgtgatcgatccggagcccgtgctcttatgactgagtcgtgacgtatcgttgattctcgtagacgaggggcttgatcccggccccatcttctccctctttgatctgctggacgacctcctcgacccgggcgaggaagagcatgctccccgtcttcccgctctccttctcccccgcccgggatctcgagaccgtaccccgaattccagcctcgacctcgggcgtcctcatcgaaaccccccctgttcgtaccacttcgtcccccaatccggtcaagggcacccagcctacgaccctgcatcccagagcgcccagtccgtgtttgacgaaaggaagccccgacggaccgtccggttcccacatgtcgacatcccggatcatattctcatgctcggcgcgggcttgggaaaatgtatgcgcgagggattcgttgggtttcgagaggagggagacggtgaacctctgtccgccaggaggtgtggttgggttctgcgggtgagactccgggtcatctcgtgatgagtcgagggtcgatgatcctgttgttgtcgacgtcggtgaagacgtctcgaatgaggtctgtaatgccgtggctagtcgtgagggtaatcgaagggaaaaggagacgagcggtggagagagggagatggaggtgaaagaggacaaggttgctccgtgatgagtcccgtcgtccagctgagttattacgatagcgacgggctgtacgcgatgacaccaggttcagagctctttacgttagcgtactgaatacagtagcacgagcaacggcgggttattgggacttgcctgaggtatggatcgcatgacgtttcgaagctggtctccgacggtatgcaacgaacgggtatacgatcgaccggctaccttgccgcgtgagattgtccgtaggatcatgccgtgtcgatatctgagcgtgtagataccaggagaatcgagtgcgcttgtcattgaccgtgtatagaacgattgcaaaaccttttcgcaaagaacaggcaacagggtcgattgtcgaacccaagggtagaagtctggccaacttccatgaggacgatgggatcatccgaagcggaagcaaacatgtggtgagcctaacggattacgtcattctattacgtaccctcctcccctgcctccccccaccgatggggggccgaagagtcctgggggcggggacggatgcgtacttccaaagagggtacttctaggaagttgacgggtggcgttgatagcgtaggccgaggtggacatgggcatcgatggaggagaaggggttcgacgagtagtaggagggatcatgtcgtctttgatagcgatgattgattgtagaggtctggtagttgcgtgctgttgaaggttgcccaagtcgtgacaaagggaatgatttgaggatcagcaagagttgatcaaatcgtacccttgatgacgggcctattgagaagacaaagggcttcgactcacgttcgtacggctgagttgaaggcgactggaccgttatatatacccttgaagatcagggagcgaaacgtatcgtgatcgcgaaaggatcgagtcgtgaaaggaagcgccttctgtaacgagcaacacttggtcaggctgcgatccagggctgagcaggcgttaccgtgctaaaggaatcttgagctcaccgtagtctggtctggtgtaagaaccaatggaggaggtaagggaaaggtgttatccaaggagatttgccagaggagagcgaaacgtatatttgccgaagaggaactgagtttccgcctcttgggttatatatgctttgctgctgctgaaagcttctcgataagctgccagggccaggtcgatgagaagtcggaccagatgtaattagggtgttcggtgagagaccgagtagtaccgggtggacagagagcgagagtgcctgaagatattattattatttgtcgggtcgatccgatacgaggtaggagaaagagaggtatggatgtgtcgggctgattgtacggacacgcagacaataaggtcaagacaagatgccggtgttgtggccgttgtgggtagatagatgatagatgttcgacgagccaaaggatgcacgaggtgggtcgacaatcatcccaaaggacgatcggtaacagaacaaagagagtatcgcagtgatcgcgcctggatcagtttttctgcccgaaggtatgtcccgaatacaaggaaacaagagcgggtactcatgctactcacaaagcgagcaggatacgagcaaaaattcagaaaccggcgaccgtcaaggatatcgagccggcgatgagcggctgagcagaaattggttcagaccgaaatatgacagtcgaccgggggctgagacgagatccacctgtgaggtcctttgattcgacgggcgctaccagagctagaatgtcacggagaagaacctcgatgatcactcttcctcgatgggcgaagttgttcaaccgtcgagaagatccacttgatgccgcttgcaatgtcggtcacgacggacggcgagttcaaggtcgaagataggttgcagtcacaaagcagtcgagagaaaggtatgagaaggcgaggcggaggagggtaaaggagtgtagtttcgaaggtgccgacttgaagactctagatgatccgaccagcggtgatctctatcgttatagacgtttgcttcggaggggtaacggggaaggtgatgcgggggcaaccgtcaatgccgtgtagtattactcaagtggatgtcttgtatcgaacaagtccaacattcaagatcgcaagatccgactcatcgaaagaaccactcaattcacggcaccgatgcactgtacactggcacgtactgggatagagattcgaccgcaaacagttctgttccaaatcgacggttctcagactgagacacgccccctctagtcgacttggctgttgcagagggaaacgcgagcacgcttccgtgacgaaagactcaggcaccgagaggggcgcgcaaaaacattgtgggtaccgtcctggaccttttccgacgacctgcacgcgtgacgagctgcacccggacgcggcgcctcgggacagcggggatgacagtttgggttcgatgccgtgtcctcctctacacgctctgttcccgttggacatgatatgactgggccggtcgcgggacagggtctgacagtacgagctgtcagcataattcgggacgttgaattgtgatcagacacacggagagatgagtagaacccggggttggcctgtcatgctgtcatgtgtgtcgactgctactattatagctatacagacgtgttgagtccaacttccgtcgattagaggggacgttgacaaggccgttgctcaattgttaattgctaacggcggatgtactgcaacacaaatgtgcctggatcacggtacaaaacacgtaagccgtcagctcaatgtcgtctcctgttgataggatgactcgaaacacccgtgcttcagatcgggacctcatacgaagccaccattcgaggagacgccttttcatcgagacgatcgaggaaccaatgtcgcaatcgatatatgcctgtaacagctgccacctaccagcggctgaattgccaaatgatcgcgtccgtatgcttagaactcggctagcgggaagccatagaacgtggaaggctgtctccaaacgcgccatcttgagagcggggccggtcggacgcgtatcatcccccgcactcgcaagccgtcgaggaggcaggcttcgtcttacaaggagcaacctagagaggatacgccgtgcttacgaaggaatgcgtactcgttaacagagattgtcgacgccaaacgttggcgctggtaccttttaaagctagaagaacaacaagggctttggaattgctcttgcactcacatccggccgctcgggcatcgtgggcaaagtgaactcctattgggaacgctagcatatttttacaagcaggccactataccctcgtgctgtacaacgccgaaaccaccgagataaatgagcgggtcgctcacaaacgtccccttaggttcaacctggtatccttctcgcctagaatatctttcaaccgcgtcaaaacctcctgcttcgtcatcttcaatccagttcccgtccttgttgctatgggcccagtgtttgcatcctgcagccctgcaagaccggttgaccgtagtattacggctgatcgccaccacggtctctctatactgagctccgcctcctctctgattttatcctgctggctaccgtccgtggcaagaggatcggcgtagaccttgatcgggcaaaattccctatgctctcttatcgtgtccaaagcccgcttcgagccccgtttgtcacccaacggtccatctccagcctcgaggggagcagcgttggtctcgcggaagttgtaaagaccgaccttgcgatcgcagatcgcacagtggaggacgtctggaaccgcggcgggaagctggtcgggagcaactttcgacgaagaggctagaggacgatacggtctccagccgaagaagctcaggttggcagcttcctgcgagatgcctgttgacgaggcatccagagcggactcggtcggggtggtgacgctttgcagactctcaaggagatttgacagttcagtagatggctagactcaacatagaagaataatcagtgaatcgtcgttgagaaaggcctcaatctaaacgtacaagacctccgacaacctgtactggtagagacgacacggtctcttcgggcctgagatagttcgcatctagctcctttgcaaccggcgccagctgggaagatagaggcggatggatggcaagtagctgatagtggactgaggctaggacgatgtagcggcgctggttaacatgcagttctgtcaaccgatctcgaaatgatgcatgacttaccaggtgattgttgctacggatcagacgagttagtatgatatttctttagtttcaaacagatatatacgcgatcgcccacaacttactatacgccacgggcatccctttctgtgcgcccggatcaattgctcctcgtacagctctacaagccttgctctcgctttcgctagctttgggtcgttcaaccctttgattacccaagccgagccacaagtatcacactgaagtctctccctgcccgaattcttccatccgtatcgcgcgacgttctggggtcgcaaggtttccggtttcgaagagtatgtcgggagcgtaaagctgagcaagcgggagcggtaggagcttgtagagttgggagcgaagggtgtctgtccagcttgcatcaaggttgtagtaggatgaacagtgtcgtctggccgcgaagaaaggagacgccgacgcttctgtgccggttgatacgtcgggtcagacggtatcaatgcgtctagcaaggcttgcagtcgtttctttgggcgcaagcgagaagtcagtggatcagctcgaattgtctgcagggaaggaaagatgcatgggtacagactttggaatacttggtgctacggatctctggctctacctgggcctcttcctcttcaggcagccggatggcatcatcgtcctcgtcccagtctgcatcgaagttgaagtcctcttcatcatcgtagagcagtcggaaagcctcgtgcagatccttctgaatgtctagatctaggggcatcttgtgagtcaccagggcaatgctaggccatattgacgagtctgaatgtgactggacaggctgcaatttgtatcgattgcaacttcatatgcacacttccagttgccccggagattgatcatatcccctgggctgggaaatgtgattacgtaagctcgtttccccgcgattcgtgtcgagcctaccttcaacgtggaggttcaatctcatacaaaagttcagagaatcggtttcaatcatcgaaccttctagcttctgacttccagggtgtcatctcgtcaagatagacaagtcacggatcatagacgtggcattcagcaccgataaaaggttccccgaattcagtcaagtcaggcgaatacacccgccgttacaggtatcatctcatataccctacatcacctaaaagagctccggcagttcgatcatcggtccacgacctcatcaaagggagaagtcccgttccacgtcaacattcgatacaccgaccatcatgaagagtcctgtatctttgttcattcttcttctgtccctgtttccttctgctctgggagctctcctggcggtggattatgggacagaatggacgaaagcatcactcatcaagcctggtcagccgctggatgttctgctggacaagggtaagttgaagcagccacaataagctcggaaacgttcgctatactaatcgagctcattatcacttcagattccaagagaaaaatgcagagcgtcttgggttacaagcgagatgaaagggtatttgggggtgaagctgtcaacgcggtacgtgttattctggagttacactcaatgaacgaaccctggctgacgagctactaacccatctgaattttaggccacacgtttccccctggcacacttcccttacgtcaaacccctgatcgctttgcccggactaccgcccgcgaacatttcctcaatttatccctcgcagcctctttacgatgccgagacgcaaactctctactttcaacacgactctgccccggcatacgctctcaatggtaatgatacttctggcaagacgacatggctgcctgaggagattctcgcccacgagctcaactatatcaaggctttggcatcatccgccgccaaggaacccgtcaccgacctattcttgaccatcccctcttacttcacccagcatcaacggaaagcttttaaagacgcagcagagattgcaggattgagtctcgtcggtagcgttggcgaaggagctgctgtcgggctgaactatgccatgaccaggcagttccccaagttgaacgaggccgagaccgcctggaacaaaaacggcgcgcagatcgacgtcatctatgatagcggagcgatgaagaccaccgctactgttctggcattttacactgctgacgttgcagaggaggccaagacgaccatctcaaagtccgggaaaaaatccaagcttcgagcgaaatcgaatcctaccacgcacgttcacgtcctggctacgagctcagagcctaccctggggggagtccagatcgatcaggcactgggggagattttggtcaaggatgttgctcaaaagttgaaaatcactgagcaggaagtcctggcggacgacagggccatgaggaagctctggaaggaggctgctaggactaaagcgatcttgagcgcaaaccaggaagccagcgtaaacgtcagtatcaaacgcaattgactcaaagagtctcagacactgatcgatttgattttcgtgctcgatctatgattagattgaaagtctgatgaacgacgaggactaccgatcgaggatctcgaggactcagctcgaagacgcttgtgcatctttcgccaataaattcgccggtcccattcaagacgccttgctcaaggctggattacagattgtaagcggatccggaaatcgtgctgctcctcgaaaggtctcgctcactttgtcgaattgatatatggacagaccgacatcaactcgctcatattgtttggaggaaacacccgtgtcccatttgtccagaccgccatcaaagcagctcttggtggcaacgaagacaagatcgcccagaacgtcaacactgacgaagcggctgtccttggcgctgcctattacggagccagccaaggccgaagtgtcgtcagcaagctcaagctaaaggttgtcgaaggcctcggttgggatgttgcgtacagcgtggcagatggtcaagattggaagatagtttcagacgagaacgccgagagctaccgtgaccaggttttgttcccggccggtaccaaccataccaccaagagggtcctcacgcttgctaggactagcaaggcccaaactggcgatcggttcagtgtcaaattcgcttataccggcatcaacgcgtacgtattccgaatgcgactttcctgcatcgcctattgacatctgtttctcatgccacagccccaatcccgccgaactcgttcaagtggacatccgagatatcgagaaggctttcaccaacatgaccgaaagcgagatcgcatcgtctcagatcaagctcactatgcgtgttgattcccgcggattcgtccaagctgctagtgctgtggcgtacatacctgccagccccaaggagaaggaatccgtcaaggacaagctcaagggtcttttcagcagttccaacaaggacgaggcagacaaggcagacgaggtgctgaaaaacttggaggccgagttggaagagctggagaactctggcgacaaggagagaaaggttgctctgaagttcagcgagaccgcccttggcgtgaaacccctttccgcagaagtcaagaagcaggccaaagctcggtaagtctggcactacatgctcagatcacacacgggctgaactcatgctttcaacatgcaagtctcgctgcgatcaacaaggtcgaggccgaagtgtccgctcgagcagaaggtcgaaacctcttggaaggttacctttaccgtctgagcggtctccttggccccgacgcgccctcggatgcgctccacaggttcggcaccgatgaggagagggccaaattgaacgccggagtccaagaggcgttcgaatggatgaatgaagaagccgagaccgccgacgtggctactctgttgaagaagcggtcgtccctggagtaagcaaagtttgaagcagttatgctgaccgagtggacagctcatgggcgtgccgcttttcagagcgatcgaattgcccatcatccggcgctaccaggaagccatcactcgtcccaaggcgatcgatgactttcaaaaggtcatgtctgccgccaggatcttcttcgttgatgcccagaggaatttgactcaggctcaagaggcagatgagccgtcgagacactcgcaagaagagttggacggcttgttcgccaaactcaaggagaacgagacgtggatgagcgaaaagatggtcctgcacaagcagatcgaagactttaccgtcgacccggtcttgctcactgcggatctgaacgataggggcaaggcgctgcagatgatggtcagtcctcgcgcgcgcggtacaacttcggccaaggtcgatcaaaatgtgatcctgatggctcatctttggattccttctgtttccaccatacaaaggtcattcggctaggcaacaagcgtatccccaaagcgaagcccaagaagatcaccacgtccactgcaacgaatgagtcgacagacgtacccgagggatcagcctctgcgacgtcgagcacggtcgaaacgtcagcgacggcgacacccgctgccgaaccttcatcagacgatgtgcccgtgcacgaagaactctagcctgtcatgatcgctgtagcatatagatgaagaagggctctctatacatggtcgagggattgatactcgtcgttccgcgccgggcatggaccataaaaagcctctcttttataaaatagctgggggatgtgccgcaactctggggtgagggagaagatacacgtggggtcccactttgacggcgcgacgattcggttcaatcgaagatctcactctcttcccccccaacccatcccacccatccatccatcaacgtcagcctttcaggtcagttcaggtcaacctctcgtccgactacacaacactagaccaccgaatcacaaacataacaggtgtatacaacacccgtcattctcaacccacccccaccaccgtcgtcgtcgacccacctcgacgccaactccggagcaatctccatccatcacgacgacgcctggcgcaaagctagcttggcgatccgtcatcaccgagatttatcgatagtgtaactcaggcaggctcgccatcatcgacctctactctgatacgcacgcacatcaaataacaccaaccgaccctacttgttctctcattgaactcccgagccgacctcatcctacacaccctcgcacctgatgggtcagaccccttccaagaagatcggccggaccaagtccaaggagctctcgcactatgacagcttttcgagaccgggcagtcactcgaacgtgcccgcggcacccatggcgggaagcctggtcattccgcctctgaaatcagattcggacggagcaggcggtgtagcaccgctcgaggtcagcacgcccggtgcgagaaagggaagcggaccggcgagcgcagtcaggggacgaggcagcgtctcgtcgggagccgctgcggcgggtgcggccgtacaaggtcgttccaagtcgcccccgccacctacagcttcctcgcctgacgacccgtccaacattgtcgccggaggtgagggcatggccgagggacgtggaacgaacaataccggttccgtgaccagtctcggctcaaaggcatcctcctctacgggcggtcccaacattcctacgacgcagacgatcactgcgagctcgcccgaccggcccagtagcaatccctttcgatcttcctctccaccacccccttcctcgttctctacctcgcccagcgccaacctctcggccggtccaggttcgtccagcctgtccacgtcacccagcccgctcgccctcgggacgtccaacacctcgggcaacaatttcaaccgcacgctcgacgtggacaatatgatctcccgtctcctcgaagctggatacagcggcaaggtgaccaagagccctcccttgaagaatgccgagatcaccgccgtatgcctggccgccagggaggtctttctcagtcaaccgacattgatcgaattgagcccgcccgtcaagatcgtcggcgacgtgcatggtcaggtcagtcgagccccctggacctcacacgtgcattgccgagtctgacgtgtcgtcttgactcgcaccctctcccgtagtacgccgacctgatccgtttgttcgagatgtgcggattcccccctgctgccaactatctcttcctcggcgattatgtggaccgggggaaacagtcgctcgagaccatcctcttgctcttgtgttacaagatcaagtacccggaaaactttttcttgctccggggtaatcacgagtgtgccaacgtgacgcgaggtgagtacctcgttcacccgccgagatcatcgctctctctctctcccccgacttaccgcccagagctgacgtgttcgatcgatccgaacggggtcctcttagtatacggattctacgacgagtgtaaacgccggaccaacatcaagacgtggaagacgtttatcgacgttttcaacacgctccctatcgcttccatcgtcgcgagcaagatcttttgcgtacatggcggtctcagtcccagtctgacgagtatggatgatatccgacggatacaacggccaacaggtgagaagcgctcggaattcgcaagactcgatcgagcacggcggtccgcgtagacacaggagcggggttggctgatggatgtttcgttttgtgtgcgtgtatgacagacgtaccggattacggactcttgaacgatctcgtctggtcggatccgagcgatacggcattggaatgggaagacaacgagcgaggggtgtcgtattgttacggcaaggccgtcatcaatagctttttagcgacccatgtgagtcggtcagcgggtcccgattaggctagcggagtgtcgcccctcgtaatccgccgtggaaaagctgacgggtctgcttgtttacaggacatggacctgatctgtcgagctcatatggtagtcgaagtgagccgatcctgccggacgagacccgcaaggcgtggaactgacgccttttttttggcgatttataggacgggtacgaattttacaatgataggaccctggtcaccgtcttctcggcgccaaagtgagtgccagaattgatcctatgctactgtcattgccctcgctgatcgtcattttacttccatcagttattgtggggtaagccatgacgctgaaagaaagaggctctgtgcgacggactgcgctgatctttgttgcgccccgacgtgatttcctcccctacgatcaggagttcgatgtcagtgttgtctcacacgacctgttcatattcgacctcgaccacgagctaacatcttcttgcgcatctgcagaactttgccgccgtcatgtccgtatcggaagacctgctatgctcgttcgagcttctcaaagtaggtcgtttcgcacaacaacgtctgaccaaagaagtagcgtacagatccctgacgttgatgctctcacagcctctcgatggagcagcgctcaagaaggagatggccaagaacaaacggaaaaggtgagcacttgagccatctgtttggcaagacaagggcatcgcttacgatgccgtcaatgtctagtctgcaacaacatcaatctccgcccaacacccaggtggtacagaccttctagtccatcccacgctcctgtccgagtctcgcttcactatcccttggaaggatacacggacgctgcacgtctcttccctaacgcttgcattctccgcctcgggttcaggtccccctgtctcttctcttcgattgcatcgatacccctctgctccgtcgtcaagtcatctccggaaacacacctcgctagagctttgcgccgtcgagccatccccatgtaccaacagtctcaataccgacgcactcatacggtgatccgatgggtctcgcgcgcgttgctcgtcctctccttcccgggaaattttgttgtctcacgtctatcgtcggtcggtcggggacgtcgttcatgtatttacgctcagttcaaactctccaaaaggatcgcgccgatgaagtgctatggaatttcttatcaacttgggtcgttgacacattggttgggtgacgagcccgtgccagtcgagcagtgtactgtactctgggtacgggagacttacacacctggctgtgccgtgatccttcgcttcgttgtgcgggatgacaggccacgagagcctagttgccgaaagaaaggcattatgacacgaatcatcagctcatgaccaagacgatggcggatccaggcgtattgaccgcggaaagaatatcaagcttctcgttgatcacctcggatcggatggcccgacccactcacacgacagtttgaacccgtcctggactaggcaaaaacaaaatcgtcgaagatgaactcataggcatcgtcattcgtagggacctcgtcgatcgtaaggagtcagtgatccgtcaattggaatgcagatgtggtatgatgcggtcaagattgagctacaagacgaatacgagatacaagttgccgagatttccattgtacatatttcctacgcctagtttggatcgaaatgtccactcttgtccatgactcggccgagtgatctggattgcgtacggactggaggcaacgccttgctggttttgctgacgagagacgctccaaaagccgaacggactgccggttttcgattcgtaacacccgagaccgagctcgagccgccgatcttgcgggtatctgtgcttctctgggattcctcattgagatgcctggcatatttgctcgagtcgcgagagatcatggactatcatcggtgaacgtagatgagcgcaacccagcagtgtgatctgtacgcttcacttacaggtcttggcgcgagactttgcgaatcgttccgcgtaacgacaaaagacgagcgctcgtcatcggagccttccgtatcgcttcccgaattctggcaaacgagatcgacactccgtttctaagaggtcgccttgtcagaatcaggtttcacgcggtgcgcttgccttccttgcttacattttcgatggccagttctcgggcctttgcgctgatggtcttttgcggaacgatttcatccccagccggactggttgacggttgatatacgggcttggcaaggagcttagatgggggcccaggtagtggtagatcaaagacccgctgatcgtcctcgatatctccaaactcctcgtcactcgacgccacaatctcctggtggacgtggtgaaacgcgctctcccggtctatgtcagcgcgacaagtggtcagccgtgcataagcctagctttctctcgacgcaaggacgcaccgacgcctttgagctcgcgctcccttctgcgcttcttgctccgtctgatcttgcgatcctcgtcctcgtcgtctgaaaactcgatgtcgttcatcttgccattctttccggtacgataaatacccctggtcaggtcttccgccacttttcgatgtttctcgtcatcttgctcggcaatctccctagggatccaaaggtgatcagtattgcgatatttgatcccggtcggcgacctgcatctcttacctgtatttctgctggcgttgctgttcttccctttccagctcttctaccgttttctccgcgtcgtcgacgagttcttcgaggatggcattgggatcctcgtcctcctcaatgtcgtcctgtctggtaccgccaccccaaccattctcctcgtcactctcctcggcttcaccctcgacgaagcgagcctttcgttccgcaatgctcttcggatcaagctttagctgtgatcgaggtgccgccttcaacacatcgaacgcattccttgggcgaggttgggctacgggagccggatcggatgcgatctcggtcaacgtcaatccgtcagagtcgagcagcaggtgagcttccgagctcggtcgaggaagatcgtcgtcgtcgggttcggaaagagatgacgagggccggcggtgcttgagtcggcgaagggttgcgaactcgtctttggccgcactcgacatgctgtgatcggcatcgtctgtccgcggtggcgatcgatatgtcgccgacaagggcatcgactggatcgacaaatgttcagatgcgccttcgctctgcaagctggtcgacgtatcggcctttttcaggggagctcgcccggccggccgggtttgcgtcaacaagctgttcgggttgcgcataagtggtcgtttcgtgtgatacgggcattgtcaggcttacccttgctcgttaaagtactgcttcaggggacctttctccacctcgagagtttctggttccagcatcatttcaccctcgagcaattcttcgttgcggcgcttggcggtagcggagatggtcgggtctggcaaatggatctgggtagccagaacggcgtcggcgtcgtcatgacgcagcacgtcgaagccgccaaacgcgtcgggctgtcaaggcatgagctgtcagtcgtcgggtcggactcgctcacagggctcgaacgtagctcacctggctatctccagcctgagtggcgccaaaaaactgcgaaaacccgcctcccaaagccgctccgtcgtcctctccaaacgttccgaaacctccgaaccctgccacatcggtcgtcatcgcgtcggctaggatcggagtcgagcgaggtggcggcgtaaaagacgccttggacagcggcttgggtgtcgtctcctcatcgtcgctatcccgtaccgtgtgtacgatcgattttcgaggccgtgaacgacggggcaggttaaactcgacttcttcatcaatgtcgacctctgtttcaggcggtggcggcgtcgcatgaacgatgggctcctgagcatcgtcttcctctccgctgtagacgatcgatcgctcgtcctcgcttcccagctggcccgcctcggcgtcgatctcgacatcggatcctctctttggcttgtactcgccgtcctctggatcttcttcactgtcagcctggtcgtcgggttcgtcccagccacctcgcctgatcagatcgtccaattcgagcggtctcttggcttcgagccgtctcgccttgactccactctcctcttccttgcgttgtcgttcctttgcgttgaaaaggcgttgtctcctgatcaattcggcgtcaaagcggaccttgtcgatgatttcgactttgcgcttgtccaacccgaacggtaccactccggcgcgtttctggttggcgtgatcatagtcccgaccggcatggacgacgaggctctcggtcatggtgtccggatgcttgttcgtggcgatacccgcgagcgccgccagtctctgtccggcgtcgagtcccttgccgtgcctcgcctctcgagcgtggtcaaagatcccccttgccgacgccgcgttgtgtcgcctggtaggccggataggcttcttgactgaatccggcgccccgtcaatgatcaggtcgtcctcgtcgggtcgatttcggtccctcagcaattcctcttgcatcttcttgtacgcaatggccttttgtcgtgcaagctcttcgcgtttcctagcaatgagctgttcacgctgtttcttggcaatgacgtcctcgagttccggcaaatcttcctcgtcgtcttccaggtcgacgtgcatcccggcgtgaaccttatcgcccgtgagggtcttggcattcaattcgcgcaagcgcaacttgccctttcccttgcccgtgggcgaggaccctggaccccgggtcgatccgcccggattccgattccctccgctactgaatttcccaatctcttcctcttcctgcatccccccaggtacgatgggtgcgacgtgcgacgtccgggcctcgacgccgggtaacagatattgactcatcggtctggtctctttcccgctccctagcacggtcgtccccctcgcggggacccaagcgagttgagtctgacgcacgaaatccgtcatgcctagaccgccacccgtggcgccggtgtgggaggagcgcgctcgagccgcgggggccagtctgatgggttttgacgcgcggatcttggcctgttctcgttccatctctattcgttgctttttcgagagtggctgcggggtcccaagtcaaaaaggaaaaaaaaaggtcgacattgccatcggacctgtcagctcggccaggtcgttgacacgatggacaaattcgacagactcacccggatctttggtgccttggcgaccctcccactcgcctcgtcctcgctttcgagctcgctcaaacccaacctccctgctgacgctcgtttcctactcgccctgacgctcggagaacccatgccatcttcctcatcctcgtcctcgtccatgtcgacgtcccgatcgccatgttcatccttgtccatcatccccttgatcttgcccgagcctggccgacgggtcggtgaagtgggcgagatccccgaggtggcgatcaacatggacttgaccctggccgtcttttgcggggtggagaagctaccgagaatgtccgatgaatccgcgacctcatcgatcatgaccgacccggtcctgctcgacgtccctcgacgatcaggacgggagtgaccagctctcgcgtgatccctcgtgggcgtgattgtctgatcccctacgctgtgatcccttgcgtcgtcgtcttcttcatcatcatcatcatcgtcatctcccatgctagacaagccgatgatcttcccccgtttcttcctccgaacgccagctcttatcggagcgtacgtctcctccatgtccacatcgtcgtctcccaaaggtgagtggtgatccctgcgtagtatgcctgccgaggaagagcccgcggatgaggatttacgaggatctgatgatatccgtcggtcggatgaccctgagaggggagtgagggtggacgaggggaagagcatcatcgggtcgatgttgacgaggacgtcgtgggcgtcgtcgcgtgatgggacaaggcgggtcactgatcgtggtggggtggagaggaggttattaggctgtagtgacgttgagagagacggcgcggcgttccgttcagagatgggtgcgacagggagggaagaggtgagtgggggtaaggaggaagagaccgcttcgtccgcctgatcctgctctgcaccaccatccgaatcgtcctccttccccttgtcgtccgaatcctcctcgtcctcgtcgtcattccgatcctcctggcctagaccataccgatacccaaacccgtacctcctcctgcttctctgtcctaccccacccgccgcccccgcccctgtctcatatacacatctccgagcccacgagaccccccttcgttccgtctcttctgcctcggtgatcgcgatcttttaaagccccctttggtcccctagcacgttagccaccaccccctacgagttatctcgcgtcgtcttctcgcagccggaacgatcacgggtttcagcttgcacagcccgcataaacatcacgctgccgtacgaccatcgatattgagcacatgggtagggccgtgaccgactgactgcctgctcgaggtcctggcctccaccgatagtgcgctgcagtctagatgagatggaccgagcacattcatacgctgcgatgtcagcagctaaaatgtcacgaaacacatccattcggctgattggtggaagaatctctcccgtttatcatccgtcaagggtttgcggtcttgattcgcagccagcctcggataagaagataaagagttcagtcaacatcttgtcggcgtcgactttgctaggcaaaaactcgcatgcagacaattttgagaagatgatggaagaacatctgagcaagtggaagagagaagggcaaggcaagttgccggagactggatgagtaccggtggatcgcttggtcggcaaaggttggaggaaacacttctccattgcgactggcaaagggttccccaagggttccccaagaagcaaaggaagaccgcacaaacctgtaatacatatccttgacaggccgtttcagggatctggaggagctaagctgtcaacacagccgctacaccgacaagatcaacgctgggtctggctactttgcagtcaaagaggaattgctcaaagaatttacccgaatggcttaataatcggatcttgtggtgtgttccaatggcagacttatcattactgtttcgggagtccagggcgtgcaatggcagccggcatctttcagagcctcaccgaatgctcgaaatgcatgtcgtcctatctgggggcaaatctctctactttgatatgcaggacactccaatctgacgtcggccaacacagcagggcccgtgctgtcgattttgaaatgatcgccaagtcattcgggttatcggcaatcttgtttcgaaccgaaacgggccagatattgatcaggtgctgatttcggaacgacatcacgccgagatcacggccaaagtcaaaggacaagtctctgccacccaattgaattggggaggttagcgatcacaatttagggaagcgcgtgctgagttgcgcgaatgagtggtcattggtctcgcatgttcgtattgtattccgtccttattacaacccgtttgcttaattttccagcgcatcctgcgtgaagctcctcaatcggtcctatgttatggcgcgggcgggtcagatcgagttcgtcaatccggcaccctggaataccggacttacctggcctttttctgggccggaccatcttcctcatcgtcatcatcgtcttcctcatcgtcctcgtcctcgtcgtcatcatccccctcgccttcctcctcctcgtcgtcgtcgtcgtcgccgggagcgaaatcatcatcctcttccgaattgtattcgggatcttcctgaacctcgtcggcagagatcgctcgctaatcaccacaagtgatcagcatcggtaaaatcatcgaactggaacttgtcatgagtgactggactgacctcttttctctttctcttgcccgagacgatatcaccctcctcaccagactcctgatcggccttgttggcctcctccctcctctcatcctcttgcacctcttccttgctcgccttgcccttgccctttcccttgctgggggcagcctccttctcctcgtcgtcttcgtctttgtcgtccgcctttttcttttcagccgaacccgaaccagacttgctaccgtcctttttcagactgtcgtgtccccagttcttcaagctcttgtaacttttggtctcgcgcaattcgtcctcgctcttttcctccttcatgtgcgattcctgagccaagtgacgggcacagtaggcgacgaccttgtgcatatgagagagttgttcttcggtgtacttggacgagtcctagcgatgcgtaggagaatatcgacattgcgtggtcaggtccaagcagaatggggaggtaaagtcgagaacgtaccttgttagggttagccttgaggatctcgacgatcttccttccgctatcgtgtccgactgtctcgccgctcccatcctccttgctccatccggacgaggtagacgggtcggatttgagccattcctccaggtcctagtggaagcgaagagagatgcagtaaagagcgatcagttatggttcatcgtcaacagcgaatgaaaagggcttcttacatcggcagtcatattgacatactctatgtttccatcatcgacatcaaactcgtcagcgcaaccatacacaatacagtggaaatccagagatagaacgtaccgttgaactgctcgatcacttcgctgtcggatttagtcattttggtaaatgttcgtgcggaaggtctgcggggtagtaggatatacgaccgtgtcagttcgtctgtaacgtgaggtcctgtcgtcgagcgaaggtctttcaggatcgagacatactcgttttgtgtctacggatctacaggaagacgctgtcgaaggaatagattatggtgttttcgacatgaagcttaacaacttggcattcctaagtatacttaactacctgtcctttacctctagatgctagatgggtgacgctcgatcgggaaggtcgatgcgctctgctccttcctacagtgatgaattcggttacgtcactcgaaagcgacgcgaatacaagggtggaggctggctagtctgagggacaggggcgacgcgtaaatagatgtcgattattgcagggtcaacggttccgaacaagttgacaactacaagttggaaaggttcatgtcaatcggccatcgcatcattggcttgcttacctcaaaaaacctcacacatacagacctcattatgaatccgatcaacatgttcgctcggcggcaactctccacatcatcccgcgtggcgtcgtcttcccggcctctcctgccttcaggtcgactctcggcagaccaacttcgtcaactcgtcgacctccaccactcggcatcgacgttcatcaccccttcctctctccctcagatcgtcgaatccgtctttgagcagacgcacatcgagacggcctcagacgaatctcttcgatacgccgcggcccgtcaactcgaacgaggaggtatccccggtcaaaaggccgataccctcgtcgaactctccgtcagccgaaaaggtcaagccttgaagggcaaccgaaacatccctgaggaacgtcttcttggatacgcttcctcctcggtcccctcccgagctcctaccgcggtgaccttgttcaggcggacaaacggatcgaactccctctcatggtcggacgagaaagtaggcgagatgatcaacccggccggtgtccatcagtcgggcaagaactcgactggcgcgttggcttacgaaccctatgcggacaacttggtcgccctgagggagagcaggcgggatgacgccttgttcgggaccgtcgcgcatagtcgacccggattggaggccgtgctggatcacatgcgcgagagcgctcatcaagagtcggtcgagcaggccaacaaggattagggcggccagggattaaaaacgcttagaatcaaaaggtggcacgcaatacgggatgcatcgccgtggtctctgtggggaaagagaccctaaaagacgtacaggccgccaatccaattcaaccgactgcccttcgccacccccacccaacttttccccaactattccctagaccccggcaatagctgaacgctactaccgcagccgggacacgcacgacgatcgccgacgtacgggtgcactggctagcggtccgttctgcatatgtacagacgaggacggacgttgtaacgatttcttctcctttttaacgatctatcatgttgagctttccactgcgccgacgcgcgggcaacggaactgtgaacggtattgtgtgaagggggatgattgtcagtgttaggccggaccatccaagtcgagctatgactctgtcgatcccatctgtcggatgattcagggtgtaggatgggtgagtcaacctttcccttcgctccaggcgttgacagatacagttctgggcgccttacagacgtaggacaagagttttctaggattccatcaaagccccggtggacgggctcgcggagacgccctgcgtctggcatgccttgatcagaggagtgatgattagcaggtctgagggtaaggggaataagtacttgagctcggcggagtacagacccccatatgatgttgaatttgacgagagatatacggaatcttaccaaacgattcacctgtcagattgcttattcggactgattagtcatgtactcattcagaggattgtcaagaagggatgcctgaacgaccgatctcatcgctgattacgatacgtggtgatggggacccaaagtttgtttgatggggctttcgggacgaagatccatctgttgatatgcatttgaagttgagatctcccttgtagattttataatcggctgaacgttagatttgaacatcgcatgtttttcagatgagtcgggacatcgttgcttgtaatgccaacgcatctcgccagaatgagcgaatcgggctgagtgtaagatatgatccttcgagtcgttctggacctgacatgcgctacagtagtcacttgtcgtgtactatccgtgatcagagtcctcccgggccgcgctttacaaggctgatgaaacaagtgatctcctggtccgagcaaacgcgtcatctagcgagactttcaaagatattggacgcggacgcgacgcgtttgaggcggaagagggaagtgggatggagttggctaggaacttgatcatcaatcgtaatcgaatgatttaactactttacatcgtctgactcgacttcgtgactatcacagttcaagcaatacgaaaaccttcttgtcatcgtgtacgaatcagctacctaaaacgacccggtagaccaggtcgagtccggcatggtcgcctcatcaaacgccttgttcagctcccctcccctaatctacgaacgagccgatcacgactatcccttgtccagcagccctgcctcggtcgatctcctcacgccaccaccccagactcccgcctttgaggttcaaagcacctcatcttcgtcttcccgtaccttctatttggatcccacttcaacagggccgcgcatccttgatttcgatcgcgccgccgaacacaccatgtcttcggcatcaacccccccaatcaaacggaaacatcaacagtcgaccctgggctctgctttcgccgccgtctcgtcgaatgccaacatcagtccggtcactcagaccgagaaagtcgcctcggatgagaaacgtcggcgaatctctacggggtgggacgaactttgtcgagcgacggtcagagccaggcaagccgaagagcggagacgagccagtatcacaggggaggcttcgagtggcagagcaagagtgacgaggagtgagctcgagtctagctcacccaaggctggccatgctatcaatgtgcgagcggaagggtctagcttgaggagcagcttctcgcccttcaaactggacctgagagacgaggacgacaagcttgcttcagcgaaaggtggcgccaggacgatggacgagggcgaagatgtcgatatggaggctgaagatgagctggaaaccaagccgctgagcgaagatgaagccgaaatcgaagaggaggacgagtctagctttgcaacgagcaggaggaggcagccaatcattggaacgggatttagtgatacccggattgggcatcggaaaatgatcggcaacctcaagacaggtaaaagataccagcgagaacattgtgagtagatcttttccctcagactcggcataagcctgactgtttcaaacccgtttgtcgcagattccactcttcccctcaatcaagctattactccgggcagaccatcctacctcgaactgttcaactcgcacgccctactcgacgtctatcgggtcgagcccaatccataccaactcgtccgctccaaccgcgactggtccccagcatacacttgcgcattctcgcattcggcaaaggatgcatggagcggttccgaacacagttttgccgctgtcgcgaccgaatgcggcggagtgaggatttttgacaccaaaaagagcgacacgagcgtcccggaaggttgggagaccgaggggcgaatcgggtctacatccgggactggtgaccaacagatcagtgacaagaaagacaaaggaggtccaaaatcgggcttgttctcctctcatgccaatgccatctacgacatcaaatggtccgacgacgattccatgctcacgacagcttgtgcggatcaatcgaccggaatctgggacacgagcaggacagcttcgacctatgacgagtcggcacagagtaacgggctgatcacgagactgcgaggtcataccgcgagcgtcaagactagcatatggcacgacaagagtacgtcgggcggtgtggaacgcttcttacgcacaaaaactgatgagctgcgcttggtaagatacggtcgcgaccgctggtagagacggtgacattcacatctacgatcttaggacctcgggcagagagattcgtggtagcgacgactctggcaatgttccggccgaatggatgaggcgtgcgcgcagcgacagcgattctggaaattcaatctggccagtcttatcgatcaggtccgcccatggactcggttcagtcaagaaggatcgatgcgtgagtcttgtcgtcaattggcagtcggagtgagcgctaatctttgacaacacagtccaatgctagaagtgtgacttgcttggtgcccctcgaggcgaacactcatcatatggcttcgggcggatccgcggacgggtgagccggttagcaacccatcgctctattttctgttgctgacgctttctcggcgtccagcatcatcaaactctgggatcttcgcgttacccatcgctcgagaaaatttatctcggaacctgctcagatcagtcccgatcgcacgctagaaaacaatgcgaagcgcagccgtggaatcatccacatggtcgccgcacccaagagtggcatggtgtatgccctgagcagcgattctcggtgagttgccgacagttcgcagcacatgtgaaggccgtaatactgataggtaatcttccctaggatcaccgcttactctcagcacgatctcaccgtgccgctacctatcacgtatgcccatccggacatgacgactgcgggattctaccttcgtctcgccttgtctccttgcgagaagtacatcggttatggaagtcgttcgggatcgttctacgcttgggcagcagggcagaactctcgaaaccacatgatgcgaggctcggacgcaggcaaaattgttcaaggtcttgagattggcaagagatggcatcgaagggaattgaacgccgtggattggggttacgatcaggtcagtctgaatgcatgctttctcccgttgagtgaagctcgatattgactatagctttttccgtgagcccagatcatgacttgctcggacgactgcacgactcgaatctggagaccgtctcgtgcagcttacgacgctattgctaaagatccccacgaagctagctatgattgggccggggtcgaagcctaacttcatcttcgttcacatatggaaaagagtttccactttgtctgtcgctctttgcgtagacgctcataatgcatgacataggtctgtgcaatcgtggcttgcggcattaccctcgaattgaggtatacagtgtgacacggaatgttttgatcaatggcggcagtggcggcatctaaaaatctttgccgcgtgccagccaagattttacgatcggctaattgtatcgcgcccttctattattgtattgaaatctgcaaacgggacgatcatccaggtccctccgtggatccgtggactggttcaacagatattgctggatgggctttatgactttcttagttagtttccgtcattgttacgagtccacctttgaatacccctagcctccgccaagtgaaacccccgcagagggaatatggctgtgtggtgcggcgtctcgacgtcataggaacagcagggttcgggcggaagtataatttaaaaagggaaagggaaaaaggttctgcgtggttcgcctatctgttgtggctaccgccgaggtcaccaccccgagcaatgacgcgctagggaccctaatctatgggatttcaacgcccgagggagggtgggtggggggagaccccgctcttgccgaggcaaaggaagggcagggcaagggggaggggagacccccgctcttgccgaggcaaaggaagggcaggccagggcagagcactcggggggatgggatgatccgcggatagatgtggggcgagcgtgggtcgtgggtggcgtcatcatcagatggatcaaacgaggagaagtcgtcgagtttcagcctcgtcgcatagcaataaatgtaaccagccctgtccctgtgtccctttggatcttttctttcgttcaaacgagcgagatggcaacgacgagcagaatgtaacagagtggagttggagcgacgagaggagaggagagagggcgggtggatggcaaaggacgtcgattgttgttgatcaaggtacctcaccccaatcacatcaactcggattatcaggtgaaatcttcacaaataaaggatgacatcttggtagaaagcgttcgtcatacaacttgcaactcgggactcgaccctgacatatcctcactccttgatctcgccacctcgctcaagccgatagagacaccccagatcacgagtccacccgccacaaaatgaccgaacgtcaagtctacaacatcaccgttccctgcgtctcacccttgatcaaatggtcacccgggaaagaacggggtgatatctggaacctgacctacactgactcttcctggtcggcctatgtcccgaacaccatgggaagaggaagacctggtcattcttccatcgaaggaggatcttacatgactttcacctataccggaagagacgcctggttgtacggtacggtggatggatgggagaccgggggcgatgccgggtatggcatcttgtgcgactcggatggcatctctccgaatgcgtacgaggccttgggtttgccaggtaatctgctgggcgggtgtcgagggatgatgttcggggaacacgagatcaacctgtacgtcaggggtcgcaagcgggtagaaatttggagggtgatcgccgaagcagaagccggtacgcccgggtaagtcccggtattcctccaatcgagaccactcgccaagactgacaacgccgctgaacagctcaaagttgagaaacgtgactcgagaggtcacagatcaaagcggctctctgaactcgttcttcagcaactcgaccggaagatgggacaccaagactaccttgtacggaccggacggtaagcttattgaccttgtcgttcgcctcaaatgcttcaacactcacttatcacctcgtatcatgtcgatcgaacccgaagaaaactctccttcatcgcaaatcacctacccttacgtccgcacgaccctacccggatcgagcctagctttcatcaccccgaacggttctagcgcgatctacctcatcgggaccgtcaattacgatcacacgacgtacggcgttcaggtcgacgcacaagctccgtggaaggggaacgcttcgagctcgtggggagatttcgatcaggtcctgtgggtgtttgctctgcgaggcggtcatccgtcccgtggccagtgtggcaggctgaaagtcgctaccctcgggtaaaaacaggtttcattctcccttggatccggctactccgcatagcgtcctcgtgaccaatctcgccgaggacaatcaaagttcgtttgatgtctccaaagtcatctttttgaccgccgattccgggtaggcctgcaacgacttttagcccagtttgatggggatgactgcgaacccggccgacctctgctatgccttcttgcagggataaggacggaagagaggacaggctagctaccggcgccatcgtcggaatcacggcgagtctcggcggcccattccgaagcgacttgccgctcatgcgctcggaatctttagatcggcgtcatcctggctctgactctggtctcggctaccatcttcatcttgctcaaacgcaggagaaaaaggtaatatgctttcgcaacacttcgaccttgattttcaactgatcaaagccgacttgccatgatgattcaacgcctggcagagccgaggaggaaaagagaatagcttggggaccggtcgatttgacggacgatcagcttgcaggaattcctaagcaaggagaatactcggccgggcctcaagtccagccgtgtacgtattagccgtgctgacggattcggagggaattccactaagacccgattcattgaccagatttgtcccctcttgctaccaatcacatgccactggaacaagccaaaggatctcgggctggacttccaggtgtggtggccgtcggggagacgacgagtcaagccagtgtccaatctcacggcgggtatgatcctgcggttttgcataacccactcgtcagggccaaccccgatgtgatcagtcccgtccagactactccttataatccggacgactcgccgggtgtcatgactcaggagacggacgcagggccagtgggcggcggacctattccccccagctatgacgaaaagtggcgaaatcccttgcgccctagaaactgatcggttcacagtcgaaattgggctgcctatcgcaacacaaatgaacgatgcgtatatgccatgtgtgaggatctgtctatgatacaatgcttcgcgtgtatgtatacccgcttccggttacgacaatacagcaatgagatgacttgagagcacgtccgcttcttcggcggccactgatgagagagatgagacaatcgacccatcagccgaccatcccctatctcctagtatctcgaaaaagcgaactcacccttgaggatcaacttgataaagtcttttgccacgtcgggtttttctcgctggaggcgctcgagactctcggtgctcagccgccaaagttgtgcgtctctttccgccacggcggtagcattgcggtgtgttccactcagtgccgtcatctctcccgcaaccgttccggctaccatcgtctcttgaagtggctccgtgtgatcttcgtacgtgtacgtagctcgaaggcaacccgattcgatcaagtagagcgcgtccgccatgtcaccctgagtccaaatgatgtctcccgccgataccgtcacgtgcgtaaagtagggcatgacttggtagaaaaagtcgtgcgggttatcacgagtatgatatccagcaaatgtctgcatgagcaaaggcaagggctgtttgaaagcaattctggctgggcccgcaggcttgtccttgtcttcagctggcgtgacaggcgtcgctgcgagcagacaaagagccgtttagtgacaggccttgcgttcaataatgaggctagcccttacattgaaagggccttgtcgacccgccggcttctgccaaatgactacgtcgaggactgtgggagtaagagtcactcaaagcaaagggaggcttagagacggtggggaaatctgaagatagtgcgagcgtgagcattgcggatacaaacagtatgatcgattcgattggcataccaatttgacgcgtcggctccttcttgaaggcagaagattggtagaatgccgtcctgttgagccagccgatgctaaagatcagcaagcattccctcgtagctcgcaaccggtcgacttgcaaataggcattctcgcaccactccaacgcagagtttagaccgtcaaagacttcgattctggtgccttcctggtccgcccatagatcgaccgcttgcaacgcttgtccaacaagcccatcagggctagcaccacacaagatgagcaagacgtccttttgactgagcaggcgctggatccgaacaaaggcttcggccgatgaataatcgagccctcctaccaaggcaaagtcgacgactgcagcacaacccagatcaatcggtggtgtttgaggacgagtccggttgctctctagacttactcaagaaacggattggattgtgttgccaagcagcaatgtcgagaagtcgtctgatctcgtcttccactcgtgtgatcgtaccgaaaaagactggttgatccaacggcagcatcagcatggcaaacccagaaggtctggctcgacaactcacggaaaccctggagcttcatgacgcaggtttggctcccaacctgctgaatgaattgtctttgggcatggggccgtcgaacagtcgatttggcggtagctccactgaaaacggctcggataggtcggcgtcgcgaattttggatgacgaagaagagagatgcgagcacaattcccaaaaggagtcccaggacaaagtcgaaactgcagaacgcgaagccggccgcgtcagcgagagaaagttcattatagcgatgcgtggtaaactcacatggtcatgccgatagcgatggcccagactgtaatgtattccatacgattgactctgttcctagtgtcccagatcgcttcggtcacgaggtcgattcccaacacgaaaatcagagctcctacaacgcaaacggctgcagtggagtcgagggatcagccgataataacacaggtcgcactctggaagcgacatacgcaggtagccaatgacagaaggtccgaccgtcatgatcaatgtcgtcgctcccgccagcatcaggccggataagcgagagccacctccaactcggtagactatagaagcgtgcggctcagcaatgagtttacccatattacctgggtgatcacttacacaagactgtgtttacgtagcagagatagttgggtacctgagagatacaatgcagcatgagacgcgcggaaaagggatgtctcatggcgcaactcacggtgcccaggaagccagctgccatgttagaaaccccgtgagcgagcagctcgcgatccagcttgacgtggtcttctttgagagatacgccgagtgcgggtacctgtatagttggcagccattaaaaagccgtttcgaggtagctaatgagaactagatcgagctcacgttgagcggtacatgcaggataccgaagaaaaccaaggcgagctgagtagggatgcacgcccagaaagccttccaattggtctgcttgaaatctatgaggcgttcctcgattaagttctatcgctcacggtgagggccgaacgcgatcggacgcaccgaacagagtataaaaggtgtaccacggccgagactgcttcccaacgtccaatacccagttattctcccgcaatgtagccatatcccatccaccgatggccactacgatgtagaagacaaccgggatgatgaagaagtacgcgggaaagatgagttgatgatggaagcgatgggtgatgatcctcaggatgatggcgagggcgagcgggataccccatagtgcgatggcgtgaggggactcaaagaagaacttgagggtggtcaggttgtactcgaagccttcttccttgagaccgcgagacacctcgagactgcagcgcccacgcgtcaataaagcatgcaagagcctaccaccacacattggctcaccccgtttcgagcaagaagatgcctacaccaccaatacatctaggaccatcggagtgataatcagcccaattgaattgtacgttgacacgcggaacagcgatctgctcacccaaccaagatatgccgagggaaatagccgatcaaagcgcccaacttgaacgcaccgagggcgaagaaaacaagacctgcgtcgagatcatccgatgtcagcatcaggcctgggtgtcaatagggccagtaagaacctacctgtcaagacggcactaaaagcaaatgacaccattgttgtcgcaatgatagcacggtccttcacgcctcgaaccttcagcttgtgtttcggaccttgataccttgtatcactcacattgtcgccaatctcggtggtaatgatattcgtcaagatatgaaagaatggctatggcgggaaatgctcagtcgagcgatcgatgcgtaccatcttcaggtccagagggaacactcacgacagcttcgatcatcatagacccgtttccaccactgcatcaagtctgcgtggttagttaccagaccctcggtaactctataatgaccgcactgtccactcaccggaagatgctgcctcccaatgtgtaggaaagttgactgatgatgcatctaaagacccctcgccagaacagcttcaacaacgaaaagattgatacgctgaaacgagacggtgactcacgacatgaagaacatcgagactccgatcgacccaaagtctgtaaacacggggctcgccgggaacctatcaatacgcgcagacacgagccatatgagctgaaaagcacgacgtgtcactggccccacaggtaactaacgtgatcatcccataactgactccgtccaggacgttcagcatcaatcccagaatgaccgcagggatattggaaagcggttcgagaacgacggcacgaccgacgtccttccacgtcgatttgcggacgacattgacggcttccctcgctgacgaattgatcgtgcgtacgagtcccttcacacggccaggctggaagtcgggtgggccagagccatcggcatctgcaagatccttgccgtcgtccgtgctcgaatgggtcggacgagcttgggtacctccgatcttgtccgtagagtcgacgctacccatcgagcgcacgggcggggatctcgatcgggaccccgactggccggtctcacggatggtatgcagcaacggcgtcgtctcggagaccttggcgtttctctcgaccacaacgtcctcgtcggcggtcggggtggtcgcccttcctacaggtccactgggccggatggtctgactggaagatgacaagctggcgagagcccggtaagcacccggacgtggggtctcttgacccagcgaagacccgggtgagacctcctccttgtcatgcctggatcgtttgacggccgtgtcggtatcgagcaatccaatgagcccgttggcaccactggcctggatatcagtactgccccctgaccgcagcgcatcccgatcgtccttcggtaacccggtcgacccggcgtgttttttgggagagctctccgcactggggttgggagatgtacgcagcgaggtcgagcgactgagcatgagactgagcgcgctgggtccgctcgccggggatcctaatcgtccatccgggctcgtccccgcgttcaatgtctccttggcatacaagtctttggtcggcgagacctggtccttgctgcccgtgttcgtcaggtccaaactggaatccaggatcctcgacaaccgggtcccaccgaacggtcgtccgacagactcttcgtgatcatcccgtcgatgactcgacgaagacggctcgtcgaacccggacgagccgtaggattgcgaagccagtgacgcggccaggttgagcgtgcgatcccggatagcggccgccgtcaacgagttttgactgggcggactagcggcatcttctgcatcgccgttggcatcaaacgtcacgcccgactcgcccgcccgatcagaatcatcccctccgaggccgtaccaggctcctcttcgtttgcccttggaattgctcggcatcccgcccgtcatgctctctcgacgaatacgcggagctccgacactcttggacaacgaattgtggtgcggatgatggttcccactgatcccgctcgaactcggagaggtcggtcggtgagggtttgccggatcgttgagatccttgatgggtccgacgtgctgaatcgaggttcgacgtgaaggtggacccgtggtcgatgagatgtgcggcgaggccgtgggatcacgtgcgggcatgatcgaggcaggattcgatgatttcgcaaatgtatgaatgctatgtgctatgtgggactagaattgtgatcaaggcgacctcgaatgatgcgcgatgatgtcgatgctgtggttgatcgaggtgtgaaactcgaaagatccgcgcttgatccgttgatgatgagatgatgatttgatgatttggtcgatattttgatgacggatgtcgtgaagcgagcgtttcaaagtcctggctgtctgtcgtcctcgccgaggtgtttgcagcgtgcaagtgagatcgacaagaaactcgttttggtgtcgaaacgaaagtgtcacccgagcttgtgacgtcaagagagcgggaggtggtgatggtgtgtagatagtgatggttggctgcaatgataatacgtcttgttattgcaaggacatgatgccaatatgatcggatcttgtccctcttttggagactagccacataggctcgtattttggctagatgatccaatgattgactggactgacctttgctatctccaaagctctacgtctctcttccctccctcgcctgagcatttggtcgagataagtcacccacccccttgccacccgtcacccgcccgctcggcaccgaattcaccattcaggccatcccatcccatcccagcgtccatctctacctccaatcccatcccggacccaccgaccacgggaaatctctctcaagggacgaccgaccgaccgaagctctcttgatcccgcgtcaccgacctgtccttggcatctttcatcctcggggcggaaacacctggcctgccatctaaagcatattcgaacctaggcctcctcggataacctttccataccggtcatcgcgtcgacccctcgtcgttgtcgacaacgactaaaccctccgttcaagaccatgttcccatcactctccatcccgacactcggaagaccttccactccacctcgttccccgcacgtggagacaccccagacgacctcgttcccgttcctcagcaacaaagagtacatgtcctccctcaccgccgccggaacctcctcttcatcgtcagtagccaacggaccgatctcgagtacgggctcgaccttttccacctcatcttcctcggtagaaggagccgctagagctgccgtcgaagctcccttccatgcgggaccgacgaacccgtattccccagccctgagagcgagggggagcaggaacatcagaccgaccaggagggacgtcttgctttgttccctgacgctcgtcatcgcctggttattcttcagcagcaacgggcagaacaaatccggtcgtgccgatctggccgagacgaggttggtcgccggtcggttacaaaacgtccatgccggcgcaggagacgtggacggagcgtattcagagtcttcccgccaaaagtacaactttggcgatgatgacgacagcgacgacgtctcgtcctcggggtacctatcgaaacagctgggaaggtggggaagtcttgtgcccgggctcggagggtggttgggatccaagggcacgacgagaggacacggtcagggagattttgggatagagaccatctgcgaggtgggctctggcgggaccgtcaaggtacacgggtacagcgatagcgtggccaaggtgagtgtctcctccgaaacccgttcggttgcgtccggggaggatcacgttccccgacccccgcctcgacaacgttcccgggctgatcctctcgacacgacttctcttcttggcgtcgactcggcgatgatagcacccgatcatcgcggctgacgtcggtacggtcgatgcggacggcgacctgttcgacgaatccgatgcgcccggtctgacaagactcgctgcgcatcaaccgggatggaccatctttgaaaacttgtacctgagcggaggcacgctctgggtcgtcacgtacgttgcaaacgcgtgcttggaaagatgcgcaatcccgacgccataagctgacttgcatatcaataacaaaacgacacgacacgataacatgacccgacctggacctatgcagcgacgacccgaccgtctacccagaaatgagactgatgacctcgacgggattgcctgcgaacggggatcctggcaacgagcaagcgagagaacccaagggcgacgaattggtgttcatcaccccggccgaagcgagaaagaagtggggcgatagggtctgggagatggaaggcgtgacctggttgttcaacgacgggcagtgtgagtctgagcaccccccgcgcgtcgaagcggttcaccttgctgactttcggcggcaccgtgcgcgcgttacccgccagtcatcgaccattattaccatttcgcggccgagctcttgctgggagtctggcgaacgtacgcttcgctcggtcgagcgttccagtcggacggatcgacgaccctgcctgcacccgcccgggcctggtttatccgaatgaccgaaaaaacatggagggataagccccggttcaattcggccatcctttggtccgctttcccctcgatctcggtgctctaccaggacgactgggccgatatcaaacggagcacgagttcgggtttggaaaaggcctacatctttccccgggccatcctcgctgatcgctccgccgcgttcaggggtcagaacacggccagtacgagcaggaccgtggcgagcgccattcacgtcggggatccaggtccatggtggtgggaacccgtcagacgtcaagtcttgcgtttcgccggagtcgaggaagacgtgctcgacatctccctcgaagggtacggagccgtcgatccggcgaaactgagcacggatccggacctcgtcaaggagctcacaccgcccgcaagggacccgctgtccacgctcaaggggatggggaaacgaccgctcgtcacatacatcagtcgacagagtagccggaggaggttgacagaggagagtcacaaagagttggtcaaggcgttggaatcgcacgcaaaggcgaacgattgggaactcttggtcgtcgaagcggaaaagatgaccaaggaggagcagttgcaactggccgccaggacgaccgtgagtggtctcgtgaaacgcgggacaaagtcaagcgctgatgcgtggagggggccttgcgttggtagatcatgctcggagtgcacggaaacggtctgacccatctgttgtggatgccggcgacaccccgaagtgcggtcattgaaatgttcatcagaggtggattcgcccgggattgtgagtgtggcggatcaatctccctgccttcccatatcgtataacctcgagtctcgctgacaaaaccctcgtcggtcgacccctcctacccctcttccgcgccgctgcagaccaatggacggcgcaaaacttgggaatccgtcatttcgccgtccgtcatgacgagtattcgacggcgcccaacgagcccaaggtggattacccggaaggtttccaggggacggggattaccgtcaagggagaagtcgtcgccaagctcatcgatgacaggttggcaggcaagatctgagagccaggatgacggtgggtggggttggcagaggtgtgaagtgggcgtgctcgatggcaaacatggttgttggatcggacgcacaggtcctttctagagggcaaagcagttgcgcgacacgtgccaagcaatagggggagaggtggtttcgatttctctgtcgcgttttcgatcgattttggggtaaatcgcatgtcatcagtggattgtcgctttcgacgtgcgaggatgggggaaagtgtacgttactgtattggtactgcatgaattagatgtcgaatatcgtcggaacaagggcaggcgtgtatgtacatgctggtgtaggtgtatgtctgggtgtgttcggttgacgacgcgtgagaaatgatttattcgatgatttcactttcgctggcgctttcccccgcgcgccgcaaccgatcgaacccctgccatcccaaagcaggtcagattcgaagtgaattagggactcgaacaatattactggcactactggaccacgtcctcaactccgagtctttgtgtgaatagaatcatatcccaactcgttcacggaaacatcgacagcgctcgttcggctcgttctcatcgaatagcagcggtgattacgcgagttcgacattgaccgcgggctatatacatagctcaacgtccagaggcatcatcctcgagtgacaagactgttccagctcaattgtcggcatcttgagggtaagctcttgggacaaggacaggtctgacctgattcaaaaaagatcgaccccgctgattggtcgtttgggctacacttcgcgtcgtctttacgcgtagacggttgttgtacgtagcgacggcaaggataaacgcccggcctttacccctttggatcgaccgaccagctatcccattccccttttttgaccggcaacaacatctcatgagacgcttgcactatcctcttcagcgccagtcgatcaaacatatcaacaccccgaacaacgacgccgacgaccacgtttccgtcgaaaacgccgtcattgtaactcgacatcgaatcaacgtcgaatcaaaggcaccaccatcaacactagcacctgcactcactcgaacaagaacgacctccagagtcgagctcgacatagatgttctacaacgcgccttcgccctccccgggcctggcgcacaagatttcgcatgatcccatctcgtccgggaacaaccagaacaattcgggacccaacgccacggcgaacgggtccatcggaggcggacagggtgggaacgggtcttcaggagcaggattaggcaattcgtggcagaggcactctagttatgggaacctcggaggtcatggaggtcacggtggacatgccatcccgcccagtcccggattcgcgggcatgttgtccaacgccggtggactcgggtcaggagcaggaggaagtgggatgggagggtacaacgcgctcggaggatcaggtgctggaggtggagccggtgggggtggactaggtggacacgcggccgcagcgggtatctttggtgggcacggagggggtggccattcgtccggcatgggcgtacatgggcatcacggtctccccggtcacaatcaggggaaccacgggcagcaccctagcttttcgttgaactcgagcggactcggaggacacggattgcagcagtctcacgggccaggaggaagctcggtcgggctcggaggtgtcaacggttcaggattagggagcatgggcaacgggccgggagggatgggacacgggatgggcatgataggaggcggatcgcatggtcatttcgggatgggagggttgaacgccagtccagaagtctcgagggccacggcaagtggaccttattggcagcaacagatgatgagggccgaggtgagttgcgagacgaggtgtcggtcacagccgcatggatgactgggatggctcatcgtccggctcaattcgtgtgcacatcggggatcaggcatgtcggcaatcttcggcggcacatcatcgagcgagggcgtcggcgttggccagtcggatggtcaataacaaaacgacggccgtgcctatcctcgacccgaacaagccagtctcggtcattggtctgcacaaaaaggcgtccagcatgaacgtctcgggagggcaggacgatgcgaacgggagcgacgcggccgatagtcctcagtcccgaccggctcatccgacctcgaccacggctccagtgatccagtctcaacccgccagcgaaccttggaccgggatcgaccttggcgggatcaggctcaaggtcctcgccccctcgttgttcgccttttcacacgtgacgacgttgtacatcaaccacaaccagctcacgaccttgtccccggcgatcagcaacctcgctcatctcacccatttggacgctacgggtaacctgctgacttcgatcccacccgaactcggtctcatcacgtcgctcaaggaattgttattgtttgacaaccagttgtctgatctgcctctcgagctcggcacactacatcaactcgaattcctgggtatcgagggtaacccgatctcggacaatattcgacacgccatggcggaaaagggaacttccgggttgattcaatatttccgggataactgtccgccgccaccggcacctcctccacgaaagtgggagattgtcgaggacgaccacgacgcggtcgatgggcagaccgagcacggcgccgagacgttcagtttgatgagttacaacatcctcgcggaccggtacgctcctcagaccatgtacggatacacgccgagctgggcattggattggtcttaccgaaaggacgccatcctcgccgagattacggattcggctttggacgtgatctgtctgcaggtaaatcgcaacgggttcctttctcgcggcttgcgattgctgacctgcccctcgcgccatacgtccccgtctaacaggaagtggaagacgaagtgttccaggactttttgcagcctcgattggccgagctgggttacgaaggagcctttagccaaaagacacgtgctcgtaccatgagcaaagaggagaggaagcatgttgacggctgtgccacattctggaaagccgcaaagttagtcttggtcgacagggctttagcgacatgttcggcggaagtgtgctcatcgaccgccttttcttcgctccagatatcaactcatcgaacagcacgtcatcgagttcaaccgactcgcgctttcaaaggccgacatgcgaacggacgacatgttcaatcgaatcatgccgttcgataacatttcgagcgtctgcctgttggaatctcgcgccaccgattcgcgtctaatcattaccaacgcacacatccactgggatcctacgttccgagacgtcaagctcgtccaagtcgcgatgttggtggacgaggtcgacaagatctcctcacaattcgcccgtctgccgcccaaataccagtcgcccgacgataacaaacctcctcctcccaactaccgggatgggaccgatatcccgacgatcatctgcggagatttcaactcgagtcctcactccgcggtctacgactttttctctcgaggtcaagttcccgctgggcacgaagactttatgagtcacgaatacggccagtacacgtcgagagggttgagtcatcgactcggccttcgaagcgcgtatggctcgatcggcgagttgccattgaccaaccacactcccggattcgccggtgcaatcgattacatctggttctctcaggccaacctgagcgtgacgagtctcttgggagagattgacaaggataccatcagcaagattgtcgggttcccccacgcccacttcccgtcagagtgagtccgccgaggccgtggccgtgagccgctggcccgagtcgctaactcgtttcgctttcgttccaaccagtcacatccccatcgcatcgactttccgagtcaaaccaccccagacggccagcaatggtcagcaccgctaccgatgatcggtacggtcacacaggagatccgcttggtttcggaccgcctcgtaagaacgcgaaacccttttacgaacccccaagacccctcggacatcaccccccacaatcgaactcgcatcgccgacgtgcccgagctgtatcatcaccgacatcacctttcgacgcaaggacgtttgcttcctgtttcttctctcccatcctaatctgcccccctctttctctcaatatcaccgacattgtatggcaagaaacggaaccggtacgatccttacaacgggtcagcgcgtgtttcgtcctcggcgatggctacacccaccctccacacgtctctgtacggtttgtcaccttgtaccatcatcaataatcatgttagtctattcctccgcttctgaacgactactggcgggctgctacaggcttcctcgagatgtgccttggtcgagtggtgacactgcatcgcagcggattcgatagcccagcggtagcccttgacccaccagggatcaacgcaaccgcgagtcacagcgacttggctcgccagcccttcttgtgctgtctcggtgttctcacgtccgttcttcgtttagcttgtatgggttcggcatacgcagacgggctgaggtgagacccccggtcaagaggcaagattcggctgggacatcaggccagtccgaaaaagggtgacctgcttgatacgctttgtgaaagagtctatcaagattactcgctaagcgaagatcatacgaaccgcagtcacgttatgattattgattgaaagacgactttgtccggattctcgactgtccgagacccggcgtaggatacaatactatgccagatcgcacaatgataaagggtcgagtgaagaccgctccagccagtgtcgagcattccaagactgctccggtcgtcgctgacccaataatagatcatggcactggtctcgtgtacaggatttcgatacagtccgtcgggagggtatgggaacgaccggagacatctccaaggagtccgaataagcaggtggaacccatcgatcctcgtcctcctccacctcacacccctggcctgtcctcgtctcccctctcggtccccctctcacaccgcgtctcacaccacaccaaaaccggcctctactcggccttgccggcttcttcctccttgacggccgcttccatctctttgagcacgaacgcgtcgatcccgtaaggcaacaccgtcgccccgtcccccgtcaagagccgatgcataggttgaggttcgtacgtctcgggcaggacctgaggagggtcgggaagaaagaccaaggatgagggatgtcagatgtcgatatcggatcgggacagggatgaaggggctcgaaggtgggaaaaagaaagtgtatgagccccccccccccaaaaaaagcccaacatcgtctccgtcgtcgtcgtcgtcggtgtgatccacccaatgagcttcgaccggtgtattcgtccgttcctactcgggatcgtctcgagatcggcgatcggcgaaggaagtgcaggtataaggaagcgatcccatgacccgattcgattcacgtcgtcctgctgataaacacatgcaaacacctctgcacagcacagaccccgtatgggtaccccagatgggttttatggcggtcggtactgattgattcccgccaggaaggctcctcttcgggacgaggcgagaggaggtgcgtcgatgatgatcccggctgtgttcggcgaggtttattcgagatcgagatcgacatacagggtgggttggaatctcacggatcgtttcaggccagggaaatcgatctgggtgttacccatctcaggaatattgtttccgctgtagagacaggtgatactgtcgaggcgatatcgatggtctcgagggaaaagtcaagattccagcaaagacaggtagacgattctcgtagtaggtcagctacgagtcttacgtgagagtagaacgatcccgtagtcattttcaccaacggtccaggatcctcagccgaggcggacgtcggcgagaacctcttgtctcttataccgcgataccacagatcggctactggattggtacccagtcgtttcggggcgaatgtcaggttggtgattgaaacgtaagcggaaaagttgggatccaagccaggccatcgaaatcttgcatgcccttgtacatctgggatgcgctcactcaaaacaaatgctcacccaacgagagacctcgcttacacccttagataaaatcgcaaggcacatttgctcgcctgcccgggatgcacgacgatcgacttgaccctttcggcggtaccgcacgtctttcatcagtcggcccgaccccgaacattgcttctacggccagagtctgcctggttcactgcattgactgtttgacaactcgtcaacaggcaactatggcctgacaccgacatgaacgggttgaccactttatatctatggctcgagcggatacatcggacctttgggaacctgcgtgatcttcgtccgcgtctacgtctgccacctgaatcgcgcggcctgagcaggggcagcctttctcttccgaccagtttgacggcagatatgcaagagcaagtctagtggtaaaagtacagtgtctgcaactcatgcattttgttgaacatcccatttgacaggttcgtcgcaaatggaatgtttctacttgaggccaaagttggggatctttggatcactgaggcaaggaacaagttgcataccacatgtttgaccaacgtccttgcactgattcacaggaagacggctaagcggtgagtactcgtactttcatcgctccctatgttgacactgccacgacttccttctgtcgcaatacaagaaaacagctactgagtttgttcatagtgtatttccaacagcacacccgtgcatgggcatgctcaactaccttttgggccggcatgactcgggataattccgcaatcaaggtgtcgtcgccggcaacctggccgaacgtcattcaaccctgatgcagctcagatcgtcgtgtttgcaggaaacgagtcggccgatggtaggagtacctgcaagcccgccctgggaatagatacggctacccgatacggatcgggagatagatccggattcgggaactaggcatacacgggggccgacgaggagatccgcctcgcttccctgcttagctgtctcctgatgggcccacgctctaggcggtcattctgcattgattccggacataacagacggaaatggtttcaggccgaacgaggcgagaagagggacgctgggtttccttatattcccaaagcgcaattgcagcgaacgcgaccatgtctgctcaaacggcctcactgctcattacaacctacacctcaccaaactggcagtcttccagtctgtcgcgctagatctcgagacggggtgcgacctgcggatctgccagctccgcccggccgatttttctgcctggcaagccccctggctacctcaaacataccttcgttcctgaggaggcgagcgcaagagacgcctcgttcacctcaccgtaacggcacagtgattgggcggaagtggctacatcgtaacccagtactatactcatgaccctctaaacaacgtgaaaacaaaggagaacgagcaggcccctcggcacctaacctgacgctacggcaaagatgcgcgtgtcaaatggaatgaatcaagtcatttcgcctgagccccggccggtaagcatcttgatgacgtgacatgaattttgaacccttcaaagctttggcatcgcatgccacctggtctatcctttgggcccaacctgctctgcctgactaccgatccctcgatggttcgcaggatcaaaggaagtattcatttatattggtctcacatcgtatgccgccccaatcgatgggtatttcagagttatatcaagctaaccgtatttgatatctatctggtcgagttccgtcttttgccgtgcgcgacttgcctttcgattaaagaatgaacaataattcccggaaacatgcgattcgccagatcgacaagcagagttgacctgaaacgggagggcgacgccagtggcagcccggagactcataacggtcaagatagtctcgaccagctaaccgcatcccgttcatatcgtctcaattcttcacctgacctttccaatttctctctcaatcgattcctgacaagggtttcgtcgacaaacttacgggcgttagctggcggtaactggacacggaggccttccaatgcgagcgatgggacgggtagctggcgaagcggagggtcttgtacaccgacctcctcgcgtgacgtttccccggtagctacaaggactcgtcagtcttccacattagcatcttggtcgccgtgtacaaacatggaagggacagactcgactatactggcgtccagatatgagcaacatgctcgggcactcgaacgaacagaagccctcgagcagcatagacggatcaacaagtatgcggagcatctgctccaatgcgcctggaaaggtcgccaaggcatcgcgaatttacagtgcccctcctggaggaatataaaaaaagtacgctgcagagcattattgcgtaatcgagttgccggaattgacttttgcatcattgcacacataggacatgatacagcatctttatgacgaaggacagaacgtatcgcttcgggtctgcgttcctcttggcgacgaccagggaacaaagagcgggcgacttgacgtgtccataaccctttcggccggaaccattcccttgatcttggaggggccgaccccgaatcactctcagtggctcggaaatcaaggactgtcgagccgctgcgatacagatatactcgtacagttcacgcggtcaggagagagaacagatctgggcccccaatacgaacggttcatcgatcgatgccacatggtcagtttgaaacggaatgacagtactggcatgatttattcgattgagtatcaatttgcaccggagccagtccggcggaagaggcttttctggtagcttggaggtggcttcggagagtccaacgagactcgttctgcgctcgatctggtgtgcgacgagccttcgaaaggacccgtcagagcgattggagcgaacagacatgtactcgtatcatcgcttcggagaatacaccttatgccgctcgtagtcgggtacgtcactgtacaacatgctagtcatcgttcttggtcgaaacatacctaatcaattacgatccgtcagcccgagacattgcacttgtcgagcggtcccactcacataaatttcgcaaacttgttccagagtgtggtatcctcgcagaactgcttggccaacgccacgtacgccgggatcgtgagatcgtccatacggaagggggtccactttttcagccccttgcgaaatttgttcatcccggtgtctttcctaggatcgctctcgccacctttctcgagcttagacagggcctcgacgtcgacctggtcaaatccaggcaaaaggtgccaagggacaggttgccggccggtagcgtccccatcggtaccattgtatcctccacgcaggagcccatcaacgtcgtaagtcgcatactcgagttcccacttgggcggctcttgcgtctgcttatcgaggtcaggtacataaaactgagcgtaacctagcggcgtgaacatctggttcgaccggcttggcgactcgggcgagtagaatcgaggtttactcctgaacttgcaatgaggctggtcctcgtgctcgggcttgtgacagttgttcttgggcttcttgccgtgcctgtgaccgcctcctgttctcttcttcccgttcttttccttcttcttcttcttcttcagcgaggcgtcatcgccggtgctctcgtagtcgtcatcgtccagttcgagtcccgtgacattgtagctacaaacaacacgattcggttagagcgcaaatgctaccttctgaaggtcccgcaaacccacctaaagactcggattccaggcaaataagtgggaatgacactaggcgaaacgtgtaccacggcgtaatcctccatcttgatcttgttcaactttggcatctggttgaaatctctgtgcaattcctgctgcagggccgtgtcggagatgcgacccatcgagtgaactcgatcagccaggccttgagcttggagactgagaggggtggtggcctcgagttcagcgacgtcgaggaagaaaaagtgatcgacgttcctatgcaagacaagggctgtcagttggaggttttgggcaggcactgatgagccgtgctcacatatgcccgtaaagatgtccaacgatggtatcttggtatcgcaatgcgagctctccatatcgcaagtactatgggcaggacctttctcaggcatgaaccgggagagctccgatcctcatcagaactcacgcagttgtcgaaatatcgccccatcttcggtggcacatgacctgtcaaccatacctaggggtagacaggttccttccgtcgtcagccacgaaccacgaaatctcaatagggtcaaacaagttgactcacctgcatacccctttccctgaaactgtccagctgtacctcgagccaatcgaactcgagcgctcctggctcgtttgatccatccttgcaaccatcgacaactgactcccccaagcagcacggttctacatgatcagcgtctgtttctggaacgctcaaatcgctcgacgagggctcgactcacccttgttggcatcgtaccaatacaaggtgttcaaactaatcacagccaacttgtctggaatgacgtcgatcgcaaagtacgctcctcgttggaagacatgataatcttctgcggggatgaaatcgctccagatactaccgagccagggcaatctcagtcagctgatagtacactcaagaatcgacacgctggacccaagttggatggaaagaaaggctcactcggtaaagctgttcgtcaccgcgttaggccctgtgaccaagatattatgagctgtcccaaagacagtcgtatcagtttcgtctatccacttttctcgactttcgcgagcaggcagcaggcatcctaaacccaaactcacgatagatgtcgttattccccagactcgggacgatgaccacatcgtccccaaacgtctccttcatcctcccgaccatcatcctattgagatcattgatctcccctggtgtacgcggattctcgctatcgatatcatgcctggcattatctcccgtccctgtacccccgattaagaatcgcgatcagtcggcgtgaacaatacagggactcgcttggatcaaggagatggaacgggtcgaggcttacagacgacgaaatccaccttgtccgcccattcctgcttgagccagtcaaaggtcatgttgacgagcgacatgggcgcatcgcaatccctattcgatgcattcatcgttacggaaaagtagaaatcagagcggactcgatcagtcccgccaaatcctcatccttttggagagcggcatatgacgtacgacgagcttgtcccccacttgcccgccaactcctcgtcttcgtcatcatcgtcgtctttcccgaatcccttgcctttcttgcctttcttgcccttctttcccttcttcttcttttcgggtttcctgtgacatcccgaatcaaaggtcgaccctgccgtataaaacgggtcgggatggaaatcggtaatgtgcaagaacctcccggtcagagctataggaagaagggtttgtcaatatcagatggcgagggttcgggaatgtcaccagggagaagcaggtcgagacagggttggggacagggctcacctcgaggttgatcttccggatcttcctgcttggccttgatgcgtgttgaccgcgcatcctccttcaaagtcttgtctgtccatcccgtcgtgtttctcgtaacgctctccagctgatcattggctaatcccagctttacttgcgatactttgcctgtcgacaattgctcgccgaggagatgatcgtgaatctccctgaaagcttgtcttgcggacaagacgttctcccaacccggttgatgttgcgagatggccgcgacggagcctgctgcgagcaaggtcgcaatgacgggtgacctcatcctgaacaactgttttcccacttgtcgccgtctagatgccgacgctccggagatgtcattctcaatccgagatgatatcaccatgccatgccatctgatcaccaactcttctttgactgcccgttacgtcggatcctcttctccggaatcaaatttctcaaatttacttccgaactcccatcaattcggatccgcagtttagcgaacgtgctctgtacaaaatcgttgtttcagacctttagcttgaggtcgagtcgtgatacaatcgtttagtgtaaaacgacacgcaatcgaggtcgacagcgttgttgatttggatcacataacgaaactctagcacgacatatgtatgattgactgatcaacaaagaaaatacctacctaaagataccatagatctacgaacgaaaccgagctgccattagggaaaccgaagggtggacgaaagaaaaataaagacggccctgaccagctacactcgatctcaagccgtaaagccaatcccaccgccttgggtattcccactagcatacgtcctgcgtaccaagcgatcccggatcaggacctggaccctcgagccatgtcttccgtgcgacatgccgtcgactcactttttacctccttggaacggcctgactggggggaacatggcgctcgtgggaaagaccaacaatccactctgcgccggaggactcgccgctatgacgtcgcggacgaacgacaatcagcacactcatcctcgatcgtgctcgacgaccgacgtccagcccgactcacatcgattcccgtccatcccgccagccgagggggtcatcatcgacactggtctcggtgaagggctatgcaacgctggtgaaggcggcgcaatggcatgctggctagccaacgtgggcggggaaaagactgtatccgctggagcgggtctgaaactaggcgcagggggtggcatgctggcccggttggtgggtgggagtgggggagccaaggctcgagcctgcaatgccgggaagaagagaatggttcggctcaagggcactacgcaatcggtcgacgctccagactcacggcagcaggacttcgaccggtgggcaaaggaggaggagcatcgtcttcgtcctcttcatacccacctgcatcaggcgtgggtgccggcaatgctcgcggaggaggcggggcctgcgagatcaaacatggctcgtcttcaggtccgttctgaatcagcatttgatgaccgcaccaagctcacatgattcatcatcatcggaggtggtggtggtggcgcaggcggaggaggtggtcccgatccgatcgaagcgttcgagctggctcgctatggccattccccggagcaagacgagacgaaacgatcagcaccgacgtgagacctttcgcggggtcgacccgaacttacggccctgcctgcagccatcatggccattgcggctggactcctccccgtgggcagaggaggaggggcgtcgtcatccccaccgccacctctcgacatcatgcccatcatgggaggagggggtggtggcggaggcccgatcggacaggcgcaaataccaattaactgaatgagcagttcctctcgtactaccctcaattactgttacggtaacactccatcagtagggtaaaactaacctgtctcacgacggtctaaacccagctcacgttccctattagtgggtgaacaatccaacgcttaccgaattctgcttcggtatgataggaagagccgacatcgaaggatcaaaaagcaacgtcgctatgaacgcttggctgccacaagccagttatccctgtggtaacttttctggcacctctagcctcaaattccgagggactaaaggatcgataggccacactttcatggtttgtattcacactgaaaatcaaaatcaaggggacttttacccttttgttctactggagatttctgttctccatgagtcccccttaggacacctgcgttatcttttaacagatgtgccgccccagccaaactccccacctgacaatgtcttcaacccggatcagcccgtaaaggaccttaaagctaaaaggtgagatgttaatctcagctccgcctcattgaataagtaaaaaaacgatggaggtagtggtatttcaccggcgccgaagctcccacttattctacaccctccatgtcttttcacaatgtcaaactagagtcaagctcaacagggtcttctttccccgctgattctgccaagcccgttcccttggctgtggtttcgctagatagtagatagggacagtgggaatctcgttaatccattcatgcgcgtcactaattagatgacgaggcatttggctaccttaagagagtcatagttactcccgccgtttacccgcgcttggttgaatttcttcactttgacattcagagcactgggcagaaatcacattgcgtcaacaccactttctggccatcgcaatgctatgttttaattagacagtcagattccccttgtccgtaccagttctaagttggttgttaattgtacaccagacgcccgaaggcagcctaagccttccagactcagtcccggccagatccaccctagttgcccagagcagttccagccaggtccaaatccttccagccaaggcccgatgcacccaacccttagagccaatccttatcccgaagttacggatctattttgccgacttcccttatctacattgttctatcaactagaggctgttcaccttggagacctgctgcggttatgagtacgaccaggcatgagagtaatacgttccgtcggtttttcaaggactgttaaggacgcaccggatgcaacagaagtgctgcactttgcccgtcattgaaccttatctccggataatccgatttcaaggttatagacggtcaaggagaaaagataactcttcccagggcccttaccagcgtcaccaacttcatttacgttaccgtcaaagatccatgtcctggttccggaatcttaaccggattccctttcgatgggcggcatggataatcatgcactttaaaacggagcttccctatctcttaggatcgactaacccatgtccaactgctgtttccatggaacctttctccacttcagtcttcaaggttctcacttgaatatttgctacttccaccaagatctgcactagaggccgtttcacccagcatcactgccaaggcttcttcactgacctccacgcctgcctactcgtcagcgcgtcacataaacgctgacggtgaggtatgggtaatacgcttgagcgccatccattttcagggctaattcattcggcaggtgagttgttacacactccttagcggattccgacttccatggccaccgtcctgctgtctagatgaattaacaccttttgtggtgtctgatgagcgtatattccggcaccttaacctcacgatcggttcatcccgcatcgccagttctgcttaccaaaaatggcccactagaaactctcattcgcatgcccacgttcacttaagtaacaagggcttcttacatatttaaagtttgagaataggttaaggatgtttcatccccaaggcctctaatcattcgctttacctcataaaactgatgcgagtttctgctatcctgagggaaacttcggcaggaaccagctactagatggttcgattagtctttcgcccctatacccaaatttgacgatcgatttgcacgtcagaatcgctacgagcctccaccagagtttcctctggcttcgccctattcaggcatagttcaccatctttcgggtcccaacatatatgctcttactcaaatccatcactaaagatccagatcggtcgaaggtgctccttgcggatccctcctacattcactttcattgcgcacttgggtttaacacccaaatactcgcagatatgttagactccttggtccgtgtttcaagacgggtcgtttaaagccattatgtcaacatcctaagcacgtacgtggacgaatcccggccataaaggcgtgctgcgttcctcagtcccaaccactgtatgtgacaagaggctataagtttacccgagggtactacgttcctcctgcctttatccagcgatcaaaactgatgttgaccccactcaaaggaagtacaccggcagaaccggctgaatccaaagagcacgactgacttcaatcgtttccctttcaacaatttcacatactgtttaactctctttccaaagtgcttttcatctttccctcacggtacttgttcgctatcggtctctcgccaatatttagctttagatggaatttaccacccattttgagctgcattcccaaacaactcgactcgttgaaaatgtatcacagagcactggtagttcatgtcaaggacgggattctcaccctctatgacgccctgttccaagggacttgtacatgagccagcacggaaaacacttctatagattacaactcggatgacctgaggccaccagatttcaaatttgagctcttcccgcttcactcgccgttactaggggaatccttgttagtttcttttcctccgcttattgatatgcttaagttcagcgggtagtcctacctgatttgaggccagatgtcaaagttacacaattagtaacatccaaagatgcacttaaagtgatggtttagttagcagacaatagtctaggtcctggccatccgaagatgtcctcagcaaaatacttattatgccaagtcaaaccagtcatatagacagatccagctaatacttttaagacgagtcggttcatcaccggcaaacgtccaaatccaaactcaagcatggaccgaaatccaaaacttgggtttgagggtttcatgacactcaaacaggcatgctcctcggaataccaaggagcgcaaggtgcgttcaaagattcgatgattcactgaattctgcaattcacattacttatcgcatttcgctgcgttcttcatcgatgcgagagccaagagatccgttgttgaaagttttattatgttataataagactacatttgttacaataatgtttagtttaaaagtggatgcaagcatccaacagtgcacaggtgttatggatatgaatgagcgggaccgaagtcaccaccccacatactgcgtgaacagtacgatttatattcattaatgatccttccgcaggttcacctacggaaaccttgttacgacttttacttcctctaaatgaccaagtttgatcagcttttcagcaataggtagccgttgccagcttcccaaagccaatccggagatctcactaagccattcaatcggtagtagcgacgggcggtgtgtacaaagggcagggacgtaatcaacgtgagctgatgactcacgcttactaggcattcctcgttgaagagcaataattgcaatgctctatccccagcacgactgagtttcacaagattacccagacctttcggccaaggttataaactcgctggctcagtcagtgtagcgcgcgtgcggcccagaacatctaagggcatcacagacctgttattgcctcaaacttccaacagctaaacgctgttagtccctctaagaagtcagcgaccagcaaaagccggccggactatttagcaggttaaggtctcgttcgttatcggaattaaccagacaaatcactccaccaactaagaacggccatgcaccaccacccatagaatcaagaaagagctatcaatctgtcaatccttactatgtctggacctggtgagtttccccgtgttgagtcaaattaagccgcaggctccacgcctggtggtgcccttccgtcaattcctttaagtttcagccttgcgaccatactccccccagaacccaaagactttgatttctcgtaaggtgccgagccagtcaaaagatgaacgtggcccgatccctagtcggcatagtttactgttaagactacaacggtatctaatcgtttttgatcccctaaccttcgttcttgattaatgaaaacgtccttggcaaatgctttcgcagtagttagtcttcagtaaatctaagaatttcacctctagcaactgaatactaatgcccccaaccgtccctattaatcattacggcgatcctagaaaccaacaaaatagaaccgcacgtcctattctattattccatgctaatgtattcgggcatatgcctgctttgaacactctaattttttcaaagtaaaattcctggttcccctacacaccgagtaaacgacatgcaggctcaccaggaggtaaggctcagccggatagtacataccgttaggcagaccaccccgccaagcctgaagttcaactacgagctttttaactgcaacaactttaatatacgctattggagctggaattaccgcggctgctggcaccagacttgccctccaattgttcctcgttaagggatttaaattgtactcattccaattacaagacccaaagggccctgtattgttatttattgtcactacctccccgtgtcgggattgggtaatttgcgcgcctgctgccttccttggatgtggtagccgtttctcaggctccctctccggaatcgaaccctaattccccgttacccgttgccaccatggtaggcctctatcctaccatcgaaagttgatagggcagatatttgaatgaagcatcgccggcacaaggccatgcgattcgagaagttatcatgaatcaccaagaagggcttgcacccattggttttttatctaataaatacaccccttccagaagtcggggcttttcagcatgtattagctctagaattaccacagttatccatgtagcaagttaccatcaaataaactataactgatttaatgagccattcgcagtttcacagtatgaatttgtttatacttagacatgcatggcttaatctttgagacaagcatatgactactggcaggatcaaccaggtaactatccaatctcacatctgtagcgttcgcacaaagggatcaaactacagttgtgccctcacaacaatggacgaatcctagagttggttgggtcgaatgtttagtgtaacatagtatcaaccttcagttgaatctcacagatcacattcaactcaaatgatcatgaagaccaagtagagattgaatcacatctgttgagttccttgtatcctgacctcgcgggtcctgaacacaattttgagggtgttagaaacaccttcagaatttgctcatgatgaagactagtgttagaagcagatcaagcccaaaggcgatcaacactttccaaaccggatctccaatgatttaggttttcaaaggttagctatcagcgagtaatccacagagctttccattgcatgttgccactatacagtgtaacatgactaaatcaggttatgcttggactgacgtcacaaacatatccacctgagccaacttctgctgtagtgctggtcaacctgaagttttcagggacacttgccttccacagattagaagttaacatgcctgacataaatgtcacaacatgcctttcatcactgtccattgttacattactaagtgatatagacataaagatgtgttcaaccataaatggtgatcaaacatcttcagtcagaaagtgtcatcacattagtagactactctactaatgctcttctttcatgaggttgctaggctgaggtccaacgcgacccaaatattattgttccataaaaatcaattttttgaggtatttttgtaaaacatttttgttagtctcaggctcattaagaaatatttgtatgaggactagatattttgtgtggaccttttgtaatgatattttaaaacaattatttcgcacctcccacagcatggatgtaatgaacatggtgtgtttatgacatctcccatgttgatagtgctcagtgcttggggacattcatgagaggtctgatgggcctgtatgggacagtcaatgtgagatatttgagatggttattgtacccatctaagaagactcttgaagcccctctcacagggtttgtgctctgatgtacatgtaaagtcactgaatttaagtgacatttgacttgtgactatcattcatagagtattatgtgtgatgcatgtcatgttggttttggggcatatcatgtgtgtattattggtggatatgttttatatgtaagactgagcatgatgcaccattgaggagttgctgatatctagtcaatgatcaagtctggcaacagtacaagtggaaactgaaactgagcatgattaaatacacaaagaagaaatattaggggtggcaaaaatgtcaagtagactgtagttagtgtgctgatgcacatcttgattgatcaaaaactttagcattcaaccttactgtgaggattcatgtggatttggcagagtgttggaatgattttgtacaagtaaggtaggagggtacttggtgtaagaagataaaggccaaaaaagtacaaaaaccacagcacctaggattcccgcgtggtcccccaccgtggtactaactaggcggcaccctggttaactgcgcagatcggacgggatgcggtgctttcagggtcctatggccgtggatagaagtatagtctgttactcctttacaacatggcaccactcactccaagtcaagtcatggacttcatgaacttttccttttttttcccttcctccttctttctctttcctatgagatccaacagatgtatcagcttgaaatagggttaagagggatgatgctgctgagagatgctggctgcgcctatttctgaactttccccctggagagcttgccacaggctccaaaaagcaaccctgaaagtatgagcccaaacggacaaaaactgagtgagatatggcctcaacacccttaacccctaaccctattcagcttcaaaattaacccctaaccccttcacacagtcagaaagaccaattcttactaacccctaacctctgttcatcctcattcttcactaacctaacaaccctaagtctgcttcaaaaagaaagtttccacctaaatgtccagttttgtccaattgtgtccagtccagttctgtccagttttgtccaagtgtgtccagttctgtccaactgtgtccacatgtgtccggtttggttggagagaagttctgtacttctttctcattaccaaggctaagaagaaacaccttcaaaacggccctagagattgagttgtaaatgagaccaaggtgtccatcaccattgccatcacagtatagtagttgaacacttcaaccaatcaagcaagtcacatccagtaaaagcctaaaccggccctggacaaaaaagtcatgaaagggagaagagttcaacaaagttgaacaaatctttagaacaagggcttagcctcagcagatcgtagcaacaaggctactctactgcttacagcaccccgttcccattaagtcgtctacaaaggattcacccccgcccatatctcaatttcaattcatcagcgagtaacaaggacctttccgtccaaactactaagccaacatttatggttcacaagccgaagctctatttaaacacatctaacatgtgcgggaccaacatcaccgtttccagtacagattctgacttagaggcgttcagccataatctagcagttgatagcttcgcgccattgcccgatcggacaggcgcaaataccaattaactgaatgagcagttcctctcgtactaccctcaattactgttacggtaacactccatcagtagggtaaaactaacctgtctcacgacggtctaaaccgggtggggggatgccaggtgggatgaattcgaatcagatcttgatgctcgtcgtcacgtaagtccaagcgttcacgtacgaaccgtggtctcatcacttttggcaagaagagacgttcacgcaagctgactcgctcgatatgtaccgtcctctcccattctcatcgcctgttcttttcgccacctcgtcccgactctcgtctcgctcggatgtcgcgcctcttacccctcgatcgctcggatcgtcccgtatcaacgacaacgacatcgatacatcgatacatcgacccggacacgcccctctcgtcgctcctacgcctcgatcgtcatcccgaccccgatcggcctcgaccccgaccacgatgacaaccccatcgcagctcgtacctcttgtactcgatcgcacagcccaacagcgggggttccagtagggaaatcacttggcaggaattgtgagtcgtccagcgaccctgccatcattcgagattcgtcgttgatcatctgctcgccctcgctcgcccgcgacctagccgcaactcgctcctcgcccgaggtctcgtctcatcgctagaggtcgtcaaccggaccaaggtcagggttcacctgcacacccccgtcccgacgaccaactcgatcgacgctcctagccccggagcaggtggccaatcgctcccttcgcctccccacggcccggcgccatacaccttcaccatcggctcggtcgaggcgttcgagagcatgctcttgcaatcccaagacgaactcggcattcctcccgccgagaggatccccgtgtcgtatcgcgaggaaatctcgaccatgcagaccatcctccatttcgcgcctaccctgttgatcggtgggttgatcctctggatggcccgtcgtggcgcgtccggtgcgggtggaccgggcggtgggatctttggggtcgggaagtccaaggcgaaaatgttcaacaaggaggacgagattagcatgcgtttccgcgacgtcgccgggatggacgaggccaaggaggaaatcatggagtttgtgaaattcttaaaggaacccgccaagtatgaaaagctcggggccaagatcccacggggtgccatcctctcgggtcctccgggaacgggaaagaccctgctcgcaaaggccaccgcgggggaggctcaggtaccgttcctgtcggtctcgggatccgaattcgtcgaaatgttcgtcggtgtcggtccgtccagggtacgtgacctgtttgccaatgccaaaaaacacgcaccctgcatcatctttgtcgacgagatcgacgccatcgggaaatcccgtggcaaaggcggtgggttcggtggcaacgacgagcgggagagcacgttgaaccagttgttggtcgagatggacgggttcggaaccaaggaacacgtcgtcgtcctcgccggtacgaaccgaccggacgtgctcgatccggccttgatgcgacccggtcgattcgatcgacacatcgccatcgatcgacccgacatttcgggccgacaacagatcttcaaggttcatctcggaccgttgacactgaacgcccacttgcccatggagaggatcgctgagaaactcgccctcctcacccccgggttctcgggagcggatatcgccaacgtctgcaacgaagccgccctcagggccgctcgacgaggaggtgacgacgtcacagaggccgactttgacggtgcgatcgagcgagtcattgccggtctcgagcgcaagtccagagtcctcggtcaagaggaaaagaccaccgtcgcctaccacgaggctggacacgccgtctgcggttggttcttggaacacgccgacccgttgctcaaggtctcgatcatccctcgaggtgtaggcgcgctcggatacgcgcagtacttgcccaaggagcgattcttgttcaccaccgaacagctcgtcgaccgaatgtgcatgacgctcggtggacgatgttccgaggaaatattctttggcaagatcacaaccggtgctcaggacgatcttcaaaagatcaccaagatggcgttcgagatctgcgccaactacggtatggacccttcgatcggacccatcagtgagtcggtccgtgcgattgcaggtggccatcgcgtgtgctgacctcgatgatgatccgctcgccaaggttacggtggacgagaggcacagggtgaacagttccagaagccattctcagaggcgaccgctcaggccctggatcaggcaggcaagtcgccggtgtctaccgattgtgatccgcaacacctttgctgacctagccatgtcgccgcccacagtcaagaagatggtcaccgacgctcacaccaagaccaagaacttgttgaccgagaagaaggccgaggtcgaaaaggttgccaagctgttgctcgagaaggaggtcatcacccgagaagacatgaggaactgtgagtcgcagcgtttcgtctcttctgctcgacgaccagcttgcctaacgcggcccacccttgtagtgcttggacgacgaccgttcgctaccgcggacgagatggaccgatacatcgagagcaagctggacgaccaaaagcaggctgctgaaggctcggcgtgagtggcgaatgcatcacttgcgatacatacaacggtatctgactgggcgttttatgcctgtagaaccggattgcagaccccgctcgccggagagccgacgctcgccaccaaggaagtaacactatgagcttcccccttcgtttggtaatgattagcacatctcccggggacatataatgtatcataaaacaagcaaacagacaccgcaccatgtagatgacattgattggaatcactttgagcattgccccgtcgaagcgaaagctgcgtcgactgatgtcagtcgactttgccatggtaagtgcaactcactgcgtccagactcgcaggccgagttttaccttgccttgagtggcaccagacaggaggttcgttacagctttagatctagagagccatcctgtgtttaggcaaagagcagccggaactataaggatatgctcatttaggatacgtgtcggttcgacttctagaatcaccctggtcaggtggtcaacagattctagaaggcgctcgtagactgaggattggtcagcatgggtggagggcacgtcgatctcggatgcctcaggagagcaaggcaaccacgtgcacctgcacgcatatgctgacgccgtcccagaggttggtatatcgcgacaagatgactgcgagtgtggtcctttcacgaacgcgcaggagcagcagtcttgacaggcatcgggctaaatttgtcaagttatggccagaaaacaactcgtcgcctggtatacctttgcgtgtcgaaggaagattagactgggcctgtgatgacatgaaaagtcctgtgggatggattcatggcccctttctgaccgctaggagtgacatgacggataaaatgaagcggcgccgcttcggcagatgtttagattaagcttcaatttgtcatccttgtcgccatcaaacccggaatgagccttgaaacgttctgcacctccggagggctggccttagacggcaggctgttccaaagattctgaaacacaatagctggggcttcctcctcttgtccatcgttgtgagcgtgagattggtgctacggagcgaataaagtggacgatgtgatgacaggtatattcaagttatgacagtaatgctcgctgcggttttaccttcctcgtatgacagagggcggggcggcttgcggagcgcatcaaccggcggcgaagctgaaacagagccgaccgactcactagcgagtcgcgacaaatttgcaagccctgtctggctagatgacgatgtacttagcgggaccagacaacagctgctattgtcgtaacgggcgagttgcaacaagggttccccttgcttctgatcctgccactctgatcaggctcaggcccgctgcagagaggatcaagactgtggatttggttgacggaatttcgacgtgactcttgctctattcgacatgacggaaggcagacgtgttgattacgcggaccccaaactcaaactcaggttcaaagcagcgcactacaacgcttgtccaatgtgctccacacaaacctttgccgacgaggatgcattgcgggtacatccaacctttgacatgacttgacgtgtagtgcgcgcttacaaatagcaccacccccaccctatgatctacaggtgtgtcgtccagtttacagtttcaactcctggaagcaaagatgggctggtataagggggccttcggagcctctttttgatatagctctacctgcccttgacgtcccggcgttgtggattgtacatatctaacaacctcttcatcaacttgaattttcattgtaaatcagcccctcgacattgacgacaagctcgtcatcggccttatttttcatcatgaatctaacccctcaacttggcaacaagctcgttgacaccctccctacattcgcaacaccgtcggtgattaaaggactcttgaggatccccgtcactggcccacctaggtcgatccccatacaagctccaaccgtgcgagttctaactcctcctgcagctccgcctccccctgccccacccgtcatcatcgacctgatgtctccttttgtggagcctcgaatctgtatcccaaaagtggctcctagatgtgaatcacatacagcaaggtatcttatacctggtcgaccattgtctgaaaaggaatgccgtccattccggcaggcgtaggaccagataatcgacgttctcgaaactgcaatccgagagaggggagaacataaggagttgaccaggcaacaacgctcactccgagaaccacctcaagagcggacccatcgcacaaacatcttacatgtcgtcaaccactattttcgagtacggcaacgcgtttcgtttcatactcgcgattctgactatttttttttagctcgcggacttggtcggtcagaggagccgccattgcgaagataaacaacgctgcatagatagaatgacacaaagcgcaaaggatctggacagtcaaagagctcaggaattcaggccccagaaggtacatcttctgcaaaagcgtgctgaccgcctcagcagctcctcagaattaggaaactgtctaagagcagatgcaatcattccggatttataccctcaggaggttctgcttctcactgcatcgctcgttccgccccctggccttagcccttgatcaccaaataaggttcgtcttgccacacgctctgctgcgctcgatcaaaaaagttaggccgcgaagcgacatcgtgaaacccacagtaggtgatcacactgaagcggttttggctgcttgtaaccgtcgtcgagcagcatcggcgagctttggccaacaggcaccgacggcatccaagagagagtttggaataatcgatctgagtttgtccacgccgacattgtcgcctccaactacatgacatgcacaccgagagaaagaaagaaacccgtcccccgatcatccatcgacgcgtccatagtcaagaatcgtttcatccgttgccttgtttttggttccacgtctcccggccaggtcccaattgaggattcctagaccgagaaaagaagaacgtctgagagagacctcttttgtcgcctttcttcgagtggatttcggattttcccccttcagacaaaaacaaaacacgggtatttggctcgtccctttcccacagcgcaggattgggaacggccgggtacgagagcgtcacgctcaagcacccaaagcggggaaggccgactcgtcgctgacggagacggcgggggcgctcgaagcgttgttacgggcaccgcctcgtccggctcggggagcaccgcctcggggggcacggtcggaggatccacggtcacctcggaatccacctcgaccacctcggcctccacggccaccctctcggggctcgcctcgcgaggggggagcgaacttgccctcgacctcgaggaagaccttttccttcctctccttctccttcttggcggcggcggccttctccttctgtgagcgtgcgcaatggacatcatattccggtgtgagtcactgccagcgctttcgaaactgaagtctcgtcatacgcgagcactgaccttggcaccggagaagaactcctcctcctgcttctggaaaacgctgccgacaaactcgctagttccatcgacggttcgtccctccaacttgcccaacttggcatccttggcggcttgacgctcggcgaggtactcttcgtaagacttggtgttgtcctcctcctcttcgggcttcttgtcagcctcctgctcggcgacggcaggggtggcgtcctgaaaaacagcgcgagcgtgaggttcgtcaggtcacagtcggtttttcacacgcctgttgggaacactcacaccagcgggggtctggggctcagcggcctccttggtggcatcagtggcaccctcgacctcggctacatcatccgcaagaacgtgcccatctacatcagtcccgttgcacaacgaaagcgcacccttcggaatcgtggtctcaccggtcaattcggcggcaccgtcctcggctccccagccggaagcgaccctcttctcagtgtcgggaagggcgtgggcggatcgacgtccgtcgtttcgcctctctccaccctggtaaccggcaccgggggcttgacctcggcctcgggttcgggtagcacggcctcggccggaaccttcaccgtgtccacggggacgggcttgtccacgctcgttcttgccaggggctggaaatggagagagaatcagagagacgtttcacatcagcatcccctcctgcggttccgaacgatacgaagagatgaagcgctgtggacgtacctcttcgctcaccctcgtatcccgactcggggtcgacggtggtgacctcggcatcggtagcgggcttggtcttgtcacccttcaagacgttcctgggtccaccacggttgtagtaacccgatcgacctccacggttggcggaagcgtcggtcttggcaccacccgcggggggcttggagccggggacctctcgggcggccttgggggcagcggcggcggcggcgggcttgggagcggcgacctgtcgaggggtctcaccgtcgtctgagggacgtaagaagaggagtagaagtcagatgcgggtcaaagcgtattcacgagttcgtcgttcaggtgggggagtgtccatctcgttgacagggcaggctgggtgtagggtgatgtttcgagacccgtggtctgtcggttctaaacgcgctggcaagagtgtccgagaaggacgtgtccttccgtcctcactgctcgacatcgacctcttccgctcgcaccccaacaggatcttctgctcccccgtcatcttgagcttgcaacacctccatccagcccatctccagcctgaggaccttttcttcccgggccttgttgagttcagtgaggggagaggagaggaggggaacagggaaagggatggagaaaaacacgggagaccggacggtcgagcactaacctccgagcaagtcgaaggggttcctggagatgacttgggtggacatcttgaaaagtaggattcccttttgtggaaaagagaagtttttctttctggttggtagtcgtgttgagcagatggaaggggggggatgaatagggttgttgtttgaaggagatgatgtgtgtcgagaagagagagagagagagagagagaggtgaggtcagctcgacctgagagcaaatgcgcgcgcgtgcgagcgaccacgacgacgacgacgaccaactacttacctaggggtttgacttttaggaaaaactcgaaaagtaaaacaggaccacaggtgcaaacgcagaatgaatcgatctaccacgatcgcatattgctccaaatcatcctgaccgcgacacgtcctcccccatccgagcgcccggaatcgtcatccagcagcagcaccagcagcagtagcagcatcgtcagacccccccaagcacggtcaaggtcgccagtcgtggtacggtgagctggggacgagcagaccccgcccgaccagccaaccagcgatggtgagccgcttcgggcgtacgaaataatccctccagtcacgtcggggcaactctggtttcgacatgcccatcattccatgtgtatacccaccttgtacgccataccctcgtcgtcccagatggctcgtccgacgatcaaaatcgtctaccctgaaatcatcaccacgatcttctaggtcgacccgttcgtcctgggtcgtcggttgtctctcttccgtcaaagcatccgacgacgacgacgtggacgacgaggatgtggcgaggtgcaaggcgcgttcgatctcgctggatgagagaccctttgattcgaggaattggatcctctgtgtcaagggtgacgaggtgacctgtacggtagcaaggtggacacggtttgggggggggttatacatgagtcatcgatgggatgaaatgttgtgctttaggacgtactttgggatcccgtaagaaagtgaccgcatcccggatcaaatctgtccgcgacgacaacaacgacgacgacgagtctgacatggtggtggtggtggtggtggtcgttgtcttggctgtcgtggttgtcctgattgaccatgggttgaatggatgatataccggttagatgacccccttcccccccggttagttgccatttgtccagagactactcgcttttttcaaaacccaaaacctcgaccctctactcccccccctcatgaaaaaaaatacatcatcatatcatcatctacataccatctactctttattgccattactactgtacgcacacccacacaccacacatcatcatgcagcctaccatcatcaaactcccctttgtcgtaggacctcccccggccgactggaaaccctcgaccgagaccaaaaaggcttcgggtgagtccagcacccccccttcttcctcccgcacatgaaccccccgttcaagtcaccatcactgatactcacacccgccttgctcgcaccctcgtcatagcccccgagaccaagtatcccgtctacccggccggtccttcgttcatcgcccaggcccgacgagacatcctgaacctctcttacgaagaggacgacaagatccaggcaaagctccaccatgagaaactccaggcaaaggcgatcgaggccggagaagaactttaccccgggttgggtgaagaggtcgaggagaagcacgtcctcgcttacgatcccaaagagtggaaggtcagtcccggtcccgtcgtcgtcgtcgtcgcaatgtctgacgcctgacacctgacaccccctcgtctcgaccctggtagaaacaagatcactacgccgtcctcggtctaggcaacctccgttacctcgccaccgaggatcacatccgagtcgcccaccgtcgtaaagtcctgcgtcaccaccctgacaagaaggccggttcttcggcaggtcccaacgacgattcgttcttcaagtgtatcgccaaggcgttcgacgtgcttttgaacccagagacgaggagacagttcgattccgtcgacccggcgatcgaggatcatgtacctaatgccaaggacgtcaagcccgaggactttagtgagtggccctcgcgggccccacatcgcgggggggtcgaccgtgatccgtcgtgtgctgatcatgatcgatcaaacgtccctttctctctttctttctctcacaccccccgcagtcgccacgtacggacccgtcttcgcacgagaagcccgattcagcaagatccaacccgtccccggtctcggcgacgacgacgccaaaaaagacgacgtcgagaggttttacgacttttggtacaactttgatagttggaggacgtttgagatgtgggacaaggaggtcaacgagggtagtgattcgtgagtgtcggcccctccctttctcctaagtggatgcctcctgtttggatacggtcaagacgtccttgtcgtcgtcgtcgtcgtcgtcgtctttgtggccggtctgctaacgcacgcccccgccccgcaggcgtgacgagaagcgataccaggaaaagaagaacaaggccgaacgtgcccgtgctaaaaaggaggacaacacccgggttcgagagatggtcgacatgatcctcgccggggaccctcggatcaagcgattcaggcaggaagaaaaggccgcgagggaggccaagaagaaggctaccggcaagcccggtgccgctggtggtggtgggaaacccatgacgctcgcccagcgcaaggcggccgagcaggccaagttggaagagctgaaaaaggagcaggaagccaacaaggccaaagaggccgaagacaaggtccagagtgccgcggcgaaaaaggctagggaagcggccaagaagaatttgaaaaagtggaaaaaggccatcacgaccgtgatcgcagagtccaactatttcgtctccaccgggtcgccttcggcttcgacgatcgaaaagcaactggccgagattgacgcgttggtcgaaatcttggaacccgagcagaccagggagttgaaggaagaggtcgaaaaggctggcaagggcgacgccgccaaggaggtcatcaaggcaaaggtcgctaccgtcgccgacaaggaagaggccaagggcaagtttgccgagtttgcctagaacccttgaccgtgaggttggtcatgattggaagttgttaggggaggatcgacgtcgaatcttgtccgtgtctctagatgcgcgcactgttcatagcatgtagcatggcatacagcgagtgggatacatgttcgatacagctttgccatgatattttttttccagactcctgccctgctccgcgtgcgcactgaatcatctgccctctggccatgagatccggatcaccttgcgccccacaccctttggccacgacttgacgtcttccgattcaccccctcgtgcttcaacctgtcgaatgaaatcgaccagacctccgccgacaccaaagtagaggatctgcgagacgacagaacggtgagctagagttcgccgtgacgaattcgtcggcggtaggaccgactgaccttggcggcgaccaagatgatcgtctcgttctcgggccacttggaacccaaatccaacttgtccagatcttccagccgatcgatccgcgtgctcgagacctcggtcgtgtgcgacgtcgacccttgacgcaggacatccaacaggctcgacacgctatcttccctgtagatcgtctcggccgtcaagacgaggtcttgtttccgctcgtccgcaccgagatgcgctgccagcccctcccagggtccatacgaaaattcgagctcgatcttgtgctcgctcaggcgggtcttgaacgtctcgacaatctcgggcgagaggtccaggtcgtcgatctcctggtcgaattgctcgggtgggatgacggccaggatgaggttgggcagggtgacgaggtgaaggacagacaggttgtagtcttgcaagtgaagcgtcgtgacgggcgtgtctcgctcgacgggggcgtccaacaaccgttgaaggagatacagcgtgggcagagccgtcccgcatccgacctcgatgacccgctttccccgtatccgctcgaccagcttgtgcgtctttgcatcatactcggccaaaacctcgaccaagtccacccctccttcccatgtcttgagaccgccttcgtaggtaccggggatcaagtccgtgtccgcatcgacgtacttggactcgagattctcttcctcggtcggctcgtctccttctcgctggtccataacctggaagcgagcatcgtagaggtcccttcgcagaacctctcgagtttcaccggcaatggtcaaatgcaaaggcgagtacgagatggaagtcggcagatgggcggcctggttcgatcacaggtcagcgagaaagccgacgagcagcccatctccgtgctcaccaactcttccacagtcgcagagaggtaggctaccccttcctgcttggcctcacgaacggcctgagccttggatgattcagctcgagtcgattgaatcacctggacctcgtcgtcggaaccggcttcatcgtcctgtaaatttgtcagtcgagtgagcggtcaacgggcgggacgacctcgggacgatggcgacttgcaatggaaaaatcgaatttgaacatgctgcaagtgatcccagggtgtttgtgaggacgaacagaggtttagagagaacagaatagaccttgctcgacttttgaccttgctcaagacccccgtcaacgttgcaaatcgcgaccttgctttgccttgttgattttgttgattttgttgaaaatctcaaatggacccccttacaaagtatggtcaaagctcgacaagacaaggtcgatggacaagaccgagatggcgtaaaaatgatcatgtcattcggttcagagcactatggctactgtctgcattcaagctggactatatcttgtacttctaaagggatactatcgtacggagacccgaggggaaacagctatggagacggacggtaaaaggaaacattcggaagcggaaaacgtaaggcactcttgtctatgtggttgatacacggtttgtcgtttgtcgcaatgctggagtatgtggaggtgatgatggtgctaatgaaggtgtccccatcgctgaaaggtgcgggagccgtctcgtgatggggccggtggtcatccgatggatgatccattgaatccagtgcgtctggtcgcaccgatcgagataccgcatatggcccaggaagaccatatttggattggcgaccacagtgtgtggaaagaggggagtgggttgatgatgatgtgcgtgttgtaccgggagtaaggctcaagagtccaggtccacgtgaataaaagaagggctcaagatgaaacgagtcgtcgtgcgttcgcgttgagacgtcgcggcagggtcaggggcgattcgatcgcatgacccgccgccattccgggctcgataggcgagagagagaagaccgtgatccgtgataaagtcgtcgtgaaaagctaggtcgcttgacgttgaaggggagaaggttgaaaaagagggtcaaccgcccgaaggggggaagagcgtagaatcgataaaacccaaaaaaagaatggtccgggagaggatgttcgtaaagtgttgttgtcgttaaatgagaccccgatgggtagcttgaggcccgacctcgagctataaatgaagacgacggacgccgccgtacaatgtcgaacatttcgatgcgatccggaggcgctcgtcccatgtcgatggctctagttgctcaatcgtcgcagcatgggcatctgatgaccctgcgtgtgcaccgtctggagcgcgacccgttgctgcgaagccgccacgtacccagccgttcccgcattcgggttcaagctctttttgggtcccaagacgtcgtaaccgggaggaaggacgttttccttcatgggggccgacatgcctccgacggaccggctcgagccgtcttgcaccgaagccatgctcatcgacatggtctgcacgacaaagggatccaccgatccgatggcacccacgggcgtgcaaggggtcttgggcaacgtctcgtcgccgcactcgctcgagctggtactgtaaaggccgctcgggctgccgttggaaaagtcgctctcccgtcgggaccacgccgagacgaggccgctgggaaggcagttggcaggcgtgagagggagctcgaccggtcggtatcgtcgtcccatggcgtagtactgcatggtcaacgtgctggccttgctgtagtagtgaggagcatactatcgaaggatgaacgaacagatatcagcgagcggtcctcgcaacgacgaccccggatccaggaactgaccttttcgatgcaaatgttggagatgttcttggtgtcctcgctgaacgactggtccaaagtggaagtcacgtgcttgacctctttttcaccgggacagaggtccatcctcggtccgtggccacagatgtgtcgagccatcaagagacaccctcgagcgatgttgctcggcttgatcccgacaaagtttcgggtaaacagagtggtctccatgatgaatcgggcaatgtgctggacctgggttgattcctgagtaccttggcaatacagcctcatccacgcctcggcagtagggtgtccgatggtccatccgatggtctgcagcaagtgtccctccactagcagcgacaacggcgatgacgacgggcggtcagcgtcttgtcccggactaccttgtccttgcggtaatgacctgagactcactctgcaagaatgccgtcacgtcgtatgcggaacaacacatatccgccaactccttgaccgtgggcacccggtccttggcatcctcaaacttgctagccatccacagggcggaacatccgaccaattggtagtgtttcttgtaaacgacccgtttcgagacgtatcggtcgacaatgttgagggcgaggtagaggacttccgggcggaggcggaactgctggtggatctcgatgaggaaatcgacgaggtaaggtcgcatgtaccactggagctcgggttgcatgtcgatgaattcggccgacgctaatgtttggttctatgtatgtcgaggtgagaggtcgggagatgagggtgagctggcggtctgggtaacgacctcgagacaaggctgcatcgccgactgacctccatctcgtgcatgtactcttcaacttcccggctgtattcatcctcgaacaacaacctgttctctcgcgtatcggcctgggcgatcgatcccatcgacatcgacatcgaccccgagccgacgttgactttggaagccatggcggcagcagcggtcctcaacgcctgactctgggcctgagcctgagcttgcacctgagcctgaacctgagcttgtacctgcgcttgagcttggaaccgttgctttgtcggtgagatcttcatggccccgctcgtggatgccgatgcggtcttgccggcatgttgggagagctgggcttggtgctgttgagcataggcgtgttggtgatgatgatggtggtacccggcggcggcttcggcgggggagacggacgctcgtttcttaatactgttcgagctcgccgccgcgtacatagagggtcgggtagatttggtaggaggtgcgggaggcatggtggtagttggtgattgatgtggttaaaatgttgagagggatatccgatgatggtgaggggagtggtgaggatgatcgaggtagcagtgatgatgttgacgaggttgttcaaagtttctgggattagaagcggtcagtcgtcggttatcgaaaccggtgccgaggtcaagcagggactcactcgacgaggttgttgagttgacggcgaggtgtatcgttgtgaatcggataggggtcaagacgcaagagcaagggtcgtgaaaatgaacgtaaaaaagtagcccggatcggcttcgttgtagcagctagcgagtcgagatgggtcgaggtggatggccgttgagatttgttggagtggagctcgatagaaggatagagtagtatgtcaaaggcttgcgtgctccttgtacgagtcctgctcgatccaacgtaaaagaattgcagggccggtcgggcggagagagggagagtgaatggtgcgtaggaaatagcgagtcgtaaggaaggaagaaacgaggggggaggacgattatgggaccgggatggatagaggattttagagtgaattaggattaggggaagggaagacgaagaagaaagatgtagtgtatccgttttgaccgaatggacgggttgcgaggatcgagtgttgggttgcgtttgttccgagggcgagtgcccatggcagtgtgttgcatgtgttgtgtggtgtgtgtgtgtgatgggatgtgacaggaattagggaaagagccgcgggttgggtgggtagggacagagtgattgcgttggaaggtagctagcgagttgtcgacctacactttgcgcttacagctgactgctccccccatccccccgcgcgcgcttctacctcgaacaactcgcttgttcacgcgagaggctaacgaccattgagctcactcaacccccccgtgccgtgctaggtgagaaccctggcgacctccaccgggctcgtgacgcccttcgctcgctccctcgctcgcactgaccctcttgccttgcccaccaccttcaccgaccactcacacctcacccatccaccctaccaaccacccgtctcacagcccagccctgccctgccttggatcccccgacagatcacctctcaagcttcatcaggagatcatcttgacaacctttcgcccgtacccgccccctcctcctctctcttcttctctgtgaatccaaacgacaaacaccgcccatcatgtcgaacgtccagactttcggtaaaaaggtcagtcatacaggtcggcttgcgagtcgagtcgagaccaggttggattagatcggatcaagggagaaaaggggaaagatggggcgtggtagggggaagtctggtactcgctcgtttgctcgaagatgaatcaacggacgacggacaatggatggatggtcggatggacggatatggagacgaacatcagtaattccagcaaacccggggacaggatttgactagacgggaagggacacgaatacgacaagcttcgccgtccggctcgccgatgggttcgatacgacacgccttcgccggcaggccctcttccttctggccggaatagacgagtcttttcgaagcgtagcatgctcgaaagacgcgtcccgtcctgttgggttagtaaagggagaagggcaagagcctggatgatcgacagaagctggcgggcaaatcatcaccgcctcctctcggccattcgataacctagcagggtcgttgctggacagaccgacggacaatttcggacaacaggcgacccgggatacgaagacctttttcgactatggaatcgtcccgaaccgacacgtcgacacatcttgctggatcatccgtctgtcctattcatccatccatctatccgtccgtctatccgaccgtccgaatgtcgacagagcaaagagcatgagcatgagccggaccgaccctccccccccgtcccagacggtttctccctacgctgtatctgatccgatctgcttctgcgtctcgcctgatcacacgtataacccaacgagattgctgacatcccccgaatccttgttttccttccctgttcaacagaaggtacgcgggaaaagctgttctagatggattttcgttgatgtgtagagtacgagactgaccttgacgactcggctcttttccctcgttttccctcgatcccgatatttaccatgatagaccgccgtgagtcatcagtcccggttcatcgatcgagaattccaaaaagagggcacgtgctgataccgtgttgatcccgtcgatagaccgccgtcgcctttgtcactcccggtaagggtttggtcaggctcaatggatctcccatctcggtcgtcgagccgtgagttcccccgtcccccgtagctccatgcgctctcgcccccgcaaccgagagctgaccatcgactcgatcaaaaccccccgcagtgccgtcctccgatacaagatctacgagcccatcctcaccgtcggtgtcgagaggttccagggaatcgacatccgtctccgagtcaagggaggtggtcacgtttcccagatctacgctttgaggcaggctatcgccaagggtgtcgtcgcgtgagtcttggagcgatgcacgcgcgcgtccaacaaaggggggagactgatcgtgccaccttttctcggtatgatacgcgtagttactttgccaagaacgaggacgccgcttcggccctcgagctcaagaaggctttggttcagtacgacaggaccttgttggtcgctgacccccgtcgtatggagcccaagaagttcggaggaaagggagcccgtgccaggcgacagaagagtgcgtacaccttgcccgtcgctcgtgctcgtgctcgtttcgattggtatactcatcgcttcctcccacccacctttgacgctccgtctcacaggttaccgttaagtgttggggatacactggcggttacgatttcgcgcgcgcgttggcggcgttctactacccgggggaaccgctcggttcggaaaagagaatgggttcacgatcgggagagagggacgtacggggctcgtcttcatctttatacgaagggggcgttttgtttttatatctggtctgtgagacccctgtttgtccgctcggaagggacccatgacgatctggatggagtgattcccctttgccgtcttcgagctctcggcccagagttgggtcagaccatggtgtgatacgccgcgacgtgatgtgtttgggacataggctgtgattctgtgcatgagcatccgcctcttccccttcgaacctctgtgaggggctaccaggtcgagatttttgaggtttcaggttgcggttaagcgccggcgtaattgccgagtaagccccgtggattgaggtcgtgtgtcgttcggcacgatagtagttaatctaagcgcttttcggtagtaaacaccccgaccgctggtgcagtgctcagacagcctctggaacgggtacgccgtgttcataccaatcagcaggtcagctttacaatgcgcgctaaaggagtggtagtgtcatatccgtcggctcgtcgtataagcgctcagctagactttgagtcttatcactcgacacgcttgagctaagatttggtcatactgcctcaacactcaagggtgacctgacccatggcctgtcaaaggtcaacttgaaagagaacaccaactcggatcctttcaatcgtttcttagatggattcgcacgatcggacctggttttttcgaacgtcctggtcgaactttcgatcgcggcactatctatccctgaatacggacaaggagccatcgtaaccgcattggtcgtatatcttcgttgggggaacggatcgaggcttcttaggtgaggggtcggcgttgaggtatctcagaggcacagcaatacaggcctcctcggtcgtaatagtgcgtgcgatggtggcgaggtgaccggctgttttgtagtgggctgatctatgctgctatatagactcgctagtccaaccggcacaaagtagtagtgaagtcatgtctccgacgcgaagtcacctttgccgtcaaaccactcatcccggtaaactgacccacgcattcagaatgagatttaatcatagtcaagggagacaccatgcggaccgacaacgtacgaacacgatgagaagactgagaggaaaccagaacattgcaaaacgcgccagatccaatctagaggaattgcatcaacaacagcattacccctgcgatgccgactaaacttctggtaacgctccgagcaggtaacgcggagttgccgggagaggcgccggggcttccactggcagcgggaatatccgatacggtagtcgaggtggacgtgggagtgggtatcggtggacctaacggagtacttgtcgataggaatctgctggtcgagatcgaattcgcgttcgaagctatatctgttgtgatactgtccaccgtggcggaccgcactgacgtggtatcgctgttggcgtcggacaacggaataggatagcgtgactggcactggaagataaagtctgcgcctgtttgtgagtagatcgtcagccatgagcacgaacgattcttgctgagaagcatcccttcttaccatttcctcgttgattctgaccgcctgctaccatcctacaattgatgcaatcaatactgatattgtaataagcgttgcaccggcattcatcatcttgtccacaagactgtcgtaaaccaaaaagtgtaagcgcttgaacaatgtttttgaataattctctcgcacgctaacctcgatggccgcaaaatcgttgtcgtatgggctgcatataggggagcaactcgccacgctggtaatcgacgagggcagaacgtcgcacttttgataataatcggtgactatatatatgcggtaaagtcgaatcagcaggccgatcctcagatgtgaagtgaaatcttccacggctcttacgttgatccgctgtcgacacctcggcaagacaggcgatgcattccgagcgaaaccatagactcgcctggcaaatgcaaggccggtccgtcctcgtgcaattctgcgcaggatcacgatcagtgactttcagcgctagccgatatgaagtctgctcacgttcaggtagtttttgccccattgattgactgcgcctgtgcattgggagacgcattcggagagaacggctcgacgagacggaccggaaggcgataaacttgagcctccgcctgtaacttgcttccaggagagagaccaggctacaaggtgacgagaatgagtggatgccatcggatggcgcaaggtcaaagtagtttaccgttggtcgatacgaatagcgcaaggggtatgtagaggatagagagcttcatcttcagctcacagcgttagatctcaagttgatcgtcatagatgaacgactcgctgaccggaacaaaggacacaacatcgctcggtgcgccttaaatacactgaactctcccttatccaatcggtaattcgacgaagtccacctgctggcctggtccctacgatccagatcgtcagtcagccgacctgatccatggctagcatgcagtcccgtaagtggggaaatatcatttcacggatcttcgactcgcaacaaagtttccatccgaatcagaatattctgcttcccagaatccactgccaagactttgtgaaccgttttcatacccgcatacgactccgtttcaaatgttcgggaccggcccttcgtcttgacggcgacgttcccatgaagcggacgacgctggagagaacgcacttccacagattttcatgagagcttcatagaacgattcacacgggaaatctcacgtttatcaacgcggatctcacggacgagtgggaattgtaaaccgttcaaaccaggatactcttgttgccggcgcgtaggcggtctgaccggaagcggattctgccggaacctgaatcggtgtgctgtagcgtgcaagccgcgcttgttaaaccttgattcagcgatcgcttcatatggtcatgagacgaaatatcctttgatctgcagctgacgatatgggagatccgcttcactgcgggatcgatcgcattttacacttatcacagattacgaaaagtatatagcgtgagcaaaagctatcgacaatagaccgtagccgatattccagccagcttctatccgcaccatgttcacgccggcgcaccgttacggagcggtccccgttgtcaacatgcagtcatctctaccttacaatcacaataacctaccgggagcatccaacagctaccgacctgggatgactaacaatttatcgcaaaaatcgcaagcatcatccgctcaaacagctttgccatggcccacttcatctatccagatcaaaccgcaacctttggctacgcaccttgggcaagaaacttggttatccttggcagcgtccgtcgccctgatcggcgcagccacattttctctttacgctagttctacgaggttggcctttcctgtgggcgctctcagcggcgagactgtaaacatccccaacctgtcggccctgatcaccgcaactggttcgatcgtcgcggcggcttttgcctttgcggtctcattgatcggcagatactggatcttgcgccagatcaagcgagaacgaacgatcacgattcatcagtggtccgctatcgctagtagcggtagtctatcgcacttgtaccgagccggcaaaatcgggggcggcttgtttctgttgacagcgctatccgtcaagctcgtcggtactgcgctctcaggcgcactggtgccgtccctgttgacgacaagcagcatgacgtggacgaatgcgatacgtctcagtggttccttcggtaaaccgtacatgagctccatggtagcttgcggacccgacttcaattgcccagccactttttttggaccatctatcgacggcgccatttcgtttgggctgaccggaattgcgaggagcgccaacgggtactttagtatcggtgagcgagaaaagctcacatgatcctttcaggaccgacgttgacctgtagaagtcgatgacaggcgaatctaggttcgaaaatctagacgcggcgtcatcccagtcccagatccagtatgccgtcttgagagtcccttccagtcgactcaacaaccgattcgaagcgaccagcgtcgaggcttgtctaccgatgctagacccaatcgtggcttgcgcagtatcggaggaccctaccacggtccggcgcgaaaacgatacctttctttcgttcgaagacatgtgcgggtgagttggcggctggctatgtgtaatctcggttgttcgttgttaatatagtcacgacgaaaatgttaatccttcgttcctccggtcagtcgccatatcgaggctggaacggcgcactcgtcgggcgcctttactttcctgtgcaactcgaccaccgatcagcacttgatgtcgttgatcctttaccttcccgcctcctttgttcgatacgattgttctatcactgccaatgaagcgggtgagtcacacaatatccatctgtgcgaccttgtgctgatgacatgccgccgtcctttgagtcagacgcccagacatacttcaactatagtagttcgacctatcgccgggggtcttcgtgcggcgcgtcgatcgcgctcaataccaccgagatgttgcccctcatcacctcggtcactgaaaagctcgacctctcgccgacccacaacgggttcaacagccataccatcctgctgagcgaccccggggctgaacaggtcaagcgccttgaagacgctatcaaggccgggatgagtatcgcagcgtcgagcctgtatttcctggctcggggcacggagaatcgattcatggccacgagctatcctcacgagtacacggccactttccctacagtgcctgccgaggtccattaccgggcttatggatggcaacggggatacaagacgtactgctgggacgccatcttatgcatctcgggcgtcctcgcgctcatcgcggccgccctaggcacccggcctcgacttcggtacgatccgaccgactgggcgcagacggtggtgatcggtctgaacagcaaggatctcgatccgcccgtcaatagcgataccggagttttaccagcagactgcgggtcgacgcgacttcaatacggccgggtcgcgccgggtcaagtggctcagttcacgaccagcatcccctgtacttcggttgtttgatcacatgtacctatgtagtagggacggcgtttctcggctcattggcggagattgtaccgatacgtgtcagtgttgattgtaacagtagggggtatgacgggacttgtccggtgattatacaatcgcgtcggattcgtctcgaagacgaatgctcgagacgaatgcgacgatagcgacgtttgcgcggtgtcggtcaagccgcagattctttgagttgtcagcgtcgtcaaagaagagggggcccaacgacacacggttgcctattgacgaccgttacgacaatctcgatatctcgcctagaaccgcagtttgtggattcgaggtccacgtccatctcgacctatcccggtccgacagacccctaacccctaaggtcctcccggggagtgccggacttcagctcttgctggccgacggtcgtgcttggtcgaatcggggacccacattcatcgatcgttcatccggtgggactatctctttggcgacccgtttgcacgctgctgcgacttggtcaagcgcccagcatgtatacggcgcaagagatgcatggagcgaacgagctagtcaattgcgacactgagtacggcctagttgaacaaatacaccgcactggccagctacatatcgagatgttgcatgcgtgtggcaagacgatgcgagagacgaattggcgtggaccgaggcttcccagcgatcgcgatcctgttagacctcgcatgcaagtcttgctacacctcgatgtggaccttgtaaccattctctatacaattaatttggtccgagctgaccagcggctctcgaacggccctattcgatgatggacatgtaggtatcatgattatatgcgactttggctttgctccgcgccatttgaccgtcaataacccccgcgaatcgtcgaccaaggtcgtttaaatcacctcgcacctcgtcgatcagtgcaagacgacactcaactgctgctgtgacggccggcatcaacaccgtagtcactctgctagatgtcgtcgtagttgtccttcgagacctcaatccaacaagcccggttctcgacccgacccatcacgtccacgtcgaaagggatcccgcacgtcgaaagggaagccggaacgatgccaccaccgcagcaagacctggatcccttgacgtttctacctcctggttcaccggacttgttttcaccacctctgcccgtcgtctctcttcctcggagtttccacacgcagtcggctcgtggactggaaggtctggaacagcgagaggtggatgggatcaggatacacttttacctgttgttctacgaagagcacgcattgttatggagctcactggagcagcatttcgaggatatggacgaggcgaggatcaatagggccatggcatggttggaagaagtggcaagtccagctcgggtcctggtcggttccaaacgtgcggctgacgacgtggtggactaggacgcggtcgagatccagccagctccagcacccaacccgttctctcctcccgatgccctggtcagcttgatcccacattcaggcatccctagagacctcgccctggaacccctgccctggcctggatctcacgttcattcgcctcagatcccgcagactccggctcctcctgctttcgggttcatggtcaatttgaacgaggaggactactttgctgcgacgacgggtgggaataccaacgcgttgcagaccgtggtcgagactaggatggagagtggaagacagaccgcggggagacgtccaggagcgggtaccgggttgagtcgggggttgagtatgggcgggttgaagatgggtggtcatcatctcgagacgcttagcacattgacgctggcgggggcaaacaacggtggacagacgaattaccctacgttcagcgaggtggcgaggtacaaggtcggaaccgtcaccccacccccgagtaaccgctggatgagcgaggagtcgacgccattcttccgaccacatggacaaggaggtgacgaggacgacgacgacgatgacgaggtcgagccgtatagcctggacgacgtggacgtggacgaggagacgatcgaacctggtggcgtcatgacctggcgaccaaagaggcaggcttcaggagataatgatctagctcggcgaacttctgcggacgagggtgtggtggcaagtcagccggcagcgacctacatcgaacctcctcgcggattcgaaggagacacggatttgggaacgacgcagtggaatgtgccgaagaaaaaggcaaccccgggtccacgactcgatgctcagcaggaacacgagaggatcgaagagttgtggcagattgcagcttccgtcgtcccacccatagcgaccatcgatccaacaaggcgggcgggacaagcgatgacgacgacgacgacgacccggcttcgactagacccacgacgactgccgacctggttgccttccttcttgttaccgctggcagcctcgctcgtgatccaccccattctctatgccgcctcgatgtcgccaacgctcccgctaccctcctcgattcaacacctcacgcagaccctcccaccaccctcgttcccggctctcgaggccaacattggattcagcatcgtcgcgtttctgggaatgctctatgctgtgccatggatgggagacgctttcgtggccaaggatctcaagggtctggacctgctcaagggcgtccacgggaccgtcatcccagagtcgatggggttgccaggcgcggcgggatacatcgggttgatgatcgtgtttatcccgttcccattctcgaaatactttgaagactcgctcaacggctggggtagtgcggggaccacgatggaacaggccgtagggagacgaacattccctcatcaagagttggcgctattcctgtcctcgatcttgtcccttttgatcgctaccttgctcggctttttggacgacgtgtttgacattcgttggcgtcataaactccccatccccatcatagccagcatccctttgctcatggtgtactatgccgagggcggatcgacgaccgtggtcatgcctatcggagccagagctttgtttggcaacacagtgaatcttgggccgctctactacatctacatgtcgctcctttcgaccttttcgaccaacggcatcaatattctcgctggcgtcaacggtctcgaagtgggacaagcgctcgtcattgcattgtcggtcgccctcaatgacgcgctgtacttgcccatctggccgagactgacgtggggttcggcgcacgtcttgctcgagggtggacctgtacttcgacgtggtagcgaggagctcattcagaggcatctcctgagtctctactttatgggccctctcatcggcgtctgtctcgggttgctctatcacaactggtgggttcgagtctcgatacgcaggttgttctcgctgacgacgactcttgtgtaggtaccccgctcgagcctttgttggggacaccttttgctactttgccgggatggcgtttgcggtcgttgcgattcaggcgcatttttccaagaccctgctgttgtttttcatccctcaaatcttcaactttgtcctcagcgtccctcagctgttcggtctcgtggcttgtccccgtcaccggctaccaaagtgagtgccgtgctcgacgtcgcaagctctcatggactgacggccgcgctcagattggactcggagacaggcctattgcgaccgtcgaccgtggtattcgcctctgctcctcctcctcgcaaaacggtcatcaccctggagctgctctccgcgttgggtcttaccagaatagagtacgatcgacatgacccgaccaagatcgtctcggccaccaatctcaccctctacacgctcgtgctggtctacaaaccgatgcgcgaggatagactgaccatgacgctgatggggatgcaggtcatgggcagcgcgttggcttttttcatacgatacgggattgcctcgctcctgtacgacggagatcgaagatagagtgtaccccgacgcgtcccccgatagatgcgctcaaatagctgttgtaaattcggtctctaggatggcatgcatcgatacattatctgatcgtgacctcatacccgcccctccatcttgtcgtaaaacgcctgccattcgtcctttttcatctgatacgtctcgggtccgatagcggggaacgtgcgttgacgaacctcatgcacgtacgtctcgatggcgttcctcgattccttgcccaactcggcgaacctgcggacgaatttgggcaccttgactgccgcctcgcctgcctcggggtcgtgttccgtggggtaaagaccgagaacgtccgtgacgaccaggacctgacccgaggtatgtggacccgcgccgataccgatggtggggatgacgagttttttggtgatataggcggcgatctgatgggggatggcttccaagagcagcgcaaacgcgccggctcgttgcatggtgacggctgtctcgtaaagtctctcggccgattcggacgttttggcctggaccatgtaacccgacaacgacgtggccttttgtggctgcaggccgagatgaggcatgacggggatgccaatctcggtgaggcgtttgaccagcgcgacgttttcttcaccgccctcgattttgactccctcgatgccgccttctttgacgagtcggatggctgacgcgacgccctgttcgacactccgttcaaacgagccaaaggggaggtcggcaatgacgaacggggccttggcacctcgcgtgacggccttgcaatggtgaatcatttcgtctagcgtgacctctgtcgttgtcgagtgaccgagcgccacttgggacagcgagtcgcctacgagacacatgtcgacggccgagcggtgcgacaggagagccgtgggatagtcgtaagcggtcatgacggtgatgggcatgttgttgttgcgcatctcgttgagggccgctagtgtgaccttttttcgaggaccggctggggcgagcgggtgcatcagcgtgggcgtctacaagttgacccgggaccgaatactcacccgtgaacccctgaccaacgggacgagcgctcatccatctccgtgacagaacggtgcgaatcgggatgagggcctgggcggcgggtcgtcttgccatgaatccaccgatgagaaagggcaatacggcgagttgggcggcaggggtactaggggactctactgcagataccggctcgatacccggttgttgaccgaaaaacacgacgctgccacgaggccactcggacattagtacgcgagacgctacatcaaatgaaccgcacgtacgagcaagtgatatcgtccctcatccacctggcgatgggagccttcatgctcaacagttcgtacgccgtcttgttaccggttgacaaggcgttccggatcaaatgggttgcggcattcttgtcctggtagacccaatctcccgaggtctggttctcgctcttggggtagcgcgaggcggattcggcggtttgcggcaagagtttcgaggtgatttgtgctcggggaaaggatctgaccgggggtttacttaagaacgatgcgaccagggcgacggattcttccgaagagatggcgtcccatactgcgaggtcattcagcgtcagcaaggcagctcccgactcgcgtgcccgaccccacttacacccatcggtcgccatgacgatgaaccggatgtcgccctctttactccctctggtcagctttttgtacgtcacgtcgggtttggccgtcacatagggaggactcttggccaaaccgtcgtccttggtgggggtctgatctggggcaatctttttgagactatctcaaaagctcgcatgagtgacgtgcgattgggtggggaagacgcctctcaactcacgcttcgtactcttccgaggtccacttgtacaacggcgcgtcaccaaacgtcctggtcggctgcaatcgacccaaaactcggccccgtttgataggatcctcaccggggtgttccctccgaagcctgaaggagatgcgtgtgacgacattcagctcgattacgtgcgactaggattggacccgatactcgcctctcgacttcgttctgattatctcccatcatatcctcgctcaagacctcgcacctccatccaccctccttgctctctccaggctcgacccagactccagcgacggcacgacaatccccggtattgctgacatagacctcttcccgctcttcgtctaccagcaggttgatggcacaagctcccgagacggcgggtgcgaccatgggcgcgacgatcggtcggaggttgggtctgcccggttgagtggggatgtgcgggatgagacgggtggccgaggtgatgatctggtcgtcgagcgtgagaaacgccgagatgatcgaactggccgtagtggtggggtcgacctgcgcgctcgtactagacgaggacaggaagggaacgacggcagagagcttggctgagagcgaggtgatgtattcgatcaggtgagccgaggtgctggttcctgagagtcggtgtgaaaaggtcgtcggaggagcgtgtccagcgtaaagtgatcggagagagaggaggatcatcgggtgcaaggtctgagagacgagctgtgcgcattcccaaccagagtgaccgtcgatgatgctaaacatcttgatccctgcttgcatctcgatcccgggcggaggttgaccggcgtacaacttggatcgactcaggacatcatgagcggaccggtcctcgatcgggtcgttgcattcgacatagttggtatcaaacctgacgaccgaagtgggtttggtttggggatcggcgggaaatgtatgagagacggcgtgccgagtgagtttggtttcagcagcttctggggagaggcgctcgtgttcatgctcgacgatgccacgacgggttttgatgcgggtggtactgcgtcacgtccgaaaggtaagtctaggttgtgcataagcaaaacggggccatggcttacaaggttttgctagtagattcggcgctggatccgcttgccgacctggtgctgtcgtccgagtgaaacccaaggagttccgggtagaaatgactgacagcggaacctcctaatgcggccacggcgagtagtccggtccagactagtttgggatctcgacctgagccgggaatcgaggtcgaattgaatcggcgcggcagtttcgatggcgaggtaacctgacgtaatcgagatgacggcaaggcgatccgtcgacgagagatgatttgaagcatcctggagtgatcgaatttgaggatgttccggtgtttatgatcaggttctccggggctcgtacgatgagcttgttcttgacctagtttcacgttccaagcagagtcaatggtcgtgaggtgccgatccgattataccacgaggtgtgcggtcgtgtttagatggtgttcgtgactatatctcttttgtctgcatgcggttgcatctgcatgtctttctgactatccctttgatacccggctataaggaattgtacattgtaacctacatggacatgaatatatcatcgttcgagcctttgaaatcgtcatcttcggttgtcggcaagtcaccgagggtcaaagcggacatcagagcgtttttatagggataaatgggtcaatgtccgtatttacgatgtccgctctctctcaatctgtctagaaaacactcagatgtccgtgattcgacatcgacaaccccgtcaacatcccagggtcaaaccaggtaggttcaagcatctcgatacatgtcatggacaactcacagcttgctactcgcccaacttgcggcttgcaatcgatcagaagcgaccaagaacagatataatcacgtatcgttgcccccaaaccagccatcatcctcgatctcacgccacgacctccggacgatcgaacggatgagacggtcgtgaaccaccgcgactgtatccaccgcattccatcccccctctctacccatctcgtgggctcggagatgggtataagagacaggtgtgtaggtgtaccgcgagttggggaatttaggtggggggtgggcgtacgtggagaatggcatggtcgcgatggtcgcgctcgttcgaaagagtctcatgggcgagtgagcaggggttgatgaggagatatcgttcgaggtgaacgtcgatgggatggatatgagcgtcgtttagaagaggtcggtaacccgtcccccgtgccccggtaatgagatgagaaccggagacggagacgatccccgagagcgtgcgcgcgacacacggccacggccacggccatgtaggagtttcgaataaaggtggaatctgggtattctgaaacggggcagcaaaaaagggggtgtttgatggtgagaccatgttatgaaacacctttggatgatcaggttgcgatgaccccgtttcatccatgtcggatatgacctcgaaaccatagatggatgtgtgatggatgtcgtctttgtcgaattacgtcatcatcaacatcatgcatggccgctcactgttgcgcgtcgctttccacctttttctctcaacaagaccacatcaataacatcgctaacatcgacattcgacatcgacatcatccacctctggcttcccaactcgcaagtcggggacaagccgaccgccaacaaggagcacagttacaccggatgtctaacctctccccaactttcaaacgaaacgtcgctttcggggccgccctggtggtagccttttgcatgggcggcatctcgacatccagtcgtttacaccaagggcgagtccacgcacgcatcccgcggcttcgatgatgatcgtatactgataccggttcgggtttcgttcggactctgggagtgcaggttgcagacttacgtaccggcgaggttcaacccggcgtcctcctcgtcctcgtggtcgacaaccgggaccaagatctcgaacaagaatacatgtccacgagaatgtcccgtcgacctgtacgcacaaccagggatgatcatcttcccaccccgaagactaccatcttctcctccccacccggattccaattccaactcaaaatcgacgcaagttgatgacgccccgaaagacgataacaacgtattcgacccttcctatacccgatggtccaccttcccacccgtcctctctacctcacctgacccccacacaggcgagccacaattacggccgataaggacgggggagatggatcggaccgtcttcaaccgtagtcagagtgggtctagtctggctcatgggcaggggcaggggcaggaaggtgaaaaggctggagcgtgggcatccatgcagacgatgaatacggctggacctggagctggagctggggatgcggacacgggaggtccattaggcgaattgacgagggattataccgtctcgttaggggaaagggacgagtcggtcgtaggattcgcgagaggaaaagtggggttgttcgtaggtgagtcgtgttccgattcggttcgacaaggaggatcggggtgggatacaggtggtcgggcttcagagatggacgagagctgattcaggtggtttcctctttttcggacctggtgtccgtttcctctggcgatcactcgcggtcatcgacgccatgatctcatggattctggtctgacctcaggatcgaggtaagcacgcccctcagtgactggtgtatcatcccatttagagtcgagctgatccatccgccttaccgcctgctctcgatggcggattcgtttccctcgaacagtcgtaagtcgatagtgacaggaatctatgggaaggccgaatcgacaatgcttagatggcctcctttggtaacgtgcctaatcgatttttcgatatgaacgggtagatgatcgcaacaacgtgagtctctgaatgggacttatttgccaggccctggcaagaccgctcattgagacgttcacctacaacctcgctttcctgcatacgcccctcgttatctcgcgctactctgcgacccgacatgaccccgccccacttcttgtcgcgcccgccttcgcctccttaccaggtcgtcaacttttgcaaggcagtcggagggaggacacagacgtggggattccatatcggcaccatgtgccacatcgactggctcgatttcaaggtcgtcagctggttcttgtgagtccgagtccccgtcagtcatgcagcgtcacggcccctcacggattcgcgcgaccggcatagggtcggcatggtggacgacgactcgtacgactggttccgaggagacgaacaacgcccggtcatgttcgagcataggatcccgcagatcatgttgcccatgatggaagaggctgggttaaaggacatcacgccggacctgatcagtatcgggtcgttgttctgggacgaggcgttcttgtggcaggcgagtcgggccgactcgaggccgtgaccggcgagcgagaccgaagctgatacgccccgatcgcgccgttctagcacggcaaggagcgggggtactataacgacgacgacggcacgtacgggttctacccacaagaactacgatggcatcgtacccgggtggccgagctggttcaattcttccgcaacatgtacggcgaggacgtcccgttgatgttgaggacgagacagcatcgagggatggacgaccacggcgggacgctcaaaatcgctcagatggatcagagcgtgagatcgatcgccaaggaattggacgtcaagctgtttacctggggggacaaattggaaggatggctcaagtgagtgtcggctgtgcaacgcgtcgcgagggtgacggctgaccatgcgagcgtttcgcaggtacgacgatcgggatcagcactttgggttcggaccgaccacctacctgtttggagagtgagtcgtcgcgcagcggtcttatgcggatcccttcgcagtcaagctcaccgctctcgacctcgacagcatgttcatgtattacctccgtcaagccacgataccgggatgctggacttgccgagaatcgcctttggcatgatgattcctcacggcaaacaatctagatgcgaaacaaacaacttgtacaaggccagaggccatcgatacccccaaacaaatcgcaaaaatcctgcctaaattccgagcacaacgcggatccctagcataaaacccaaaatgtccatcactcatctatttcaaactgggtatcttgtgaagcctgttagagcggtcgaatgcagggcataaaagagtggtcccttttgttcgacctggtcggcgaaatcgtcgtcgagcggatagatgaaagcgtctcgtacaagcatcaggttggcttgtaaatcggcgacctgttcccatgtgtagccgagcagaatctcttcgagccggtccatgtcgctctcgaggacggtgatgctgaatttagaccagtcgagaacgtcccaaaagacaagatgagtctggtcgccgaatatgaccggaacgcagccgctgtcaaggggtcgaacaacggtcaaacgcgtgtcggccgatgaaaccgtctttgatactcacgcgtagatactgtcgatcgttcgagtagcccacccggtcgttccacggacgagcgggcaaaagatggtgtccccaagtaacgcgaggtaaccgggataatcgccccacccgttccacacggtctgcaactcgttcccgccctcgagcgccggtgacgtgaaatgatcgaacggtctcgaacaggtggttttacgtcgagcttgagcaccggtacccatatacgtcgccttgaaggtggccagggtccgcctctgacgagaaggtcgcacatctgccagatctccgtaatgaacaaccagcttgggcatgaggcacgcgcgtggtggaatgctgtggacaggacggttagcaccaggtgatcgatcgttgtccaggagtctgacacatacaccacgtccatgtcgtaccggtaacctgatatggctgccattgtcagcgaggcgttgaaattagcgacgcgacttcatgctcacagtcgctgttaagatcccccatcacgctccaagctgttccatgacggaccactggtatcgccgtgctcttcttgtatcgaatcgtaaagatgtcgaacgtgaacgtattgcagacaccccaatcgtggctgaatggtacgatccacttcgactcgtcgaatgaatgagggaggtactcggtcaaggcgtattgtcgccagctttcgacgtcgggatactgaagtaagacgcagaatgtcagtggagaaatcaccttaccaggcgaccgtgcggactgacccagaggctaccctgaaagtatggtaaaaatgtgaaatggtcatcgccgtacgacgtgttgagcgatctcagcccccgttccaacatcgagtcggcgctgtagcaaccgggtttgccgggcaggaaccggtcgtacttccagttctccgtcagacgatgctcttgtacagcgggtgggagttgcgttacgtgcactttgggcagctcaggttcacgggcgagatatcggcttgcagccggacgtaggacgttcaaccacgacttttgctttaccaggtttatcagcgattggtcgtcgttcgggtcgatcacgcgggcgacgggaggataagacagctgatccaggttggcgaccgaggcaaatgggaatcgaccgatggacgtgcaggaagagagcacacaggcgcagtcgccagtatccaggcatgtcgtcggatgatcacaaaggttggtacacgtcttcatgtgacgatgtctccattcgtgcggcttgccggtcggcatttcggcttgatcgaggtggagcggaaggtgattgtcgagtcgatccagatgatcttccactacctgcagcgcgcgggtcactcgatcgcacagagtgcggtgctgagatccggcaaaaggagcagtcttttcgtacttcaggtcgttgatggccgaggcgaggggatcttcatctatgaatggccatggcgccggtttctcgcagcagaccgggatgattctgaaactgggttgcgcgggcttgtctggtgagacgcgggtgctaatgttcttggcagagggcggcaaaaagtagcctccatcattagcgacgctgagaaagacgtaacccgtcgactcgtcgatctcgacctcgaaatcggtgtgtgagccgtcggccaaggtgacattgaccacctcgtacaaccctcgacgctcgtgacccaacctgaaacccagcttgccatcggctttttcggtcaggttgaagtcgtaagagcgaggctcaaacgtccaagaccaacgccacttttgacccatatcctgggtatgcagatcgagatcgaggtaactcatctcgccccgagatttgcctacgacgttgacggtgcattcggatagtctgatcagatcatcgcgtgaatagctccgagcctggcactcccgctcgcgcttgtcgacgaggtacctctgcgtctgccagtaatacgcccgagctaattgtaccaacccttcatcgatcccgaccttggctgagaagcctaaaacacgagtagcaagctcggtactcccttcgtatcgagctgggaacctggcgtccgaagggatcgtctggatgggagaattgctccgggtcaagtgcaggatcttgcggacgagttcgatggcggagacggctcgaccggcagcgacgttgaattgctcgaacatcgccggcttgaccgaggggagcagaccgaaggaacgtcgaccaacacggccgtgtaagcgttgaaccgagaggatgatggcgtccacgacatcatcgatgtgcaccatgtcgagctgcaccgcgccatccttgtcagctttcccgccatgaaaaggacatccccacgcgccgattgagacttacgaattgatccccgccgaccatctggatcgtccgatgagcgatggcttgggtcatcatggccgggatcaacctctccctatgatcatgttcccctccatagacgttgctcaacctcagagcgatcgcatgtaaaccgtcacgatgaccttctcccgatgaaccgccgagaccgccttgctcgtcgatgaacgactggatagcctcttcagcacgcagtttggacgtcccgtacacgttcgaaggtaccgtccccgaaaactcggcgatcggttgtccgggtttggtatccccgtaaacttccctcgaagacgcttggacgagccagggaagtcgagtggtcgcccggtcggccccgtcggatgacatctgggacaagagcgtagagacggcttcgacgttgacggcggtacagtccgcttggttttctagacaccagaggacacgggagacggcagccaagttgatcaccccggcgatctggtgggtggagaagatgtgggagaggagggtctcgttacggatgtccccggggtaataagtgaagagcgggtggtccatgttcaagccggaatagggcgtcgcagcagcggtggtaaacggcagaagctcgtctcgctggaatattgggtcgatcaccaccaaagggattcgaggggaaccgctttgtagtctccggatcaagtgtttccctgaacgataccatcccggcgtgcgtgtgatgagagtcgacgattcagtaacccgaacaacccgagctcaggcgacgtgctcaccgatattcccacctccacccgtaatcaagatggcacctccagcgagctcgacctcgttagcgaaaacccgggaaaggacgttccatgccgatttttcacgtctgcccccggatccatatgatgcgtcattgcccacctggcaaacaagagggcgtagagtagacgttgcaatcagagtgaggcggcgctgaatcagcaccgtagaacgccacgagacctgcaaccaagaagatagtagcacggaagtctagcttacataatgctgccccacccaagtgagcgtcagtacgatcaccaacatgatcgcaagccgggcccggagcgggtagagacgaaggaggatacacgatcggagaagcattttgagcgtcgacagtcggtgtgatgtcgataccgtcgggagaattgaaagtggaatgattcgaggtctaagtgcacgagtgtgaaagagggaagtggcggtcgaggctgtagctgagtatatgtacgatcggggagtatccctccgatgagttgccgaaaattcccattcgatccactttgatacaagaaaggtcggaacaaaaaggaaagggcgggaatagctgcgagtcgtatcatcatcttagttggagtgaaccttgattttaagctcgatgcaatcaaactgatgacgggcgagtcgcgagttgacggtgtcaatcaggattcacagtgatggagctagcgacaccgaccagcgacagattacatcgtctaccgccgaaaaggagtgatcccacatgatattcccgcgagatccacgatatgatcatcagtccagtgaagtcgtcccccccccccccccccccccccccccccccccccccccccgtacctcgactcggaccctcgacgccatccatcaacccgaacgtcgaccgaccgacatcctttccgacctcccgacccggatcctccatcgacctctcgaaatctctcggtatcaagacgatcttccccgcccgcaatccatagtcactcgcgtttcgtatcacagagacgccgtcgatcacaccatcatcatcatccgaatctcattcacctcccgagtatcgagacccgggtccgcactctaccgatcacgctgactaccctctcataaaagcgaggtcgagatctggcccaacatagcttgtctctggctcgcgtatcgccctagatcgaatttgtaccaaaaacccgatcatgtcggatcgtatcagagacgattgagcgaacgaacgaacgaatgaacgaacgaactttgacgagcagaaagaccagatccgtagaagctctcaccgtcttggttcgccatcgtagaaccgtttgtcgagatctataccagatcgtaccatgactctgcgttcgatcgtagtagccttcacgatcgtaccgcgtccagatatcaaccccgatgggtctacaatttgatcacagacccggcacgtcagaggggttcaataatgatgaagtaaatgttcgctcttcaaggccttcaagtcaatattcacaagaaacctcacccagatagacaaagggccgttctcagacggcgatcagtctattctcgtgctcgtccccagactttgaattcccatgatcaccgatcacagattacagatcacaaaccgatcctcgctggctactacggtcgcaggctcttgcctcatcttccctttcacatgacgaaacaatgatccgaatcccacttttcgtccttgagactcgtaactcacaatgagcaggctacgatagaatagacgcggagcagatagcagaacgcagaacacgatcgtgtgaaacatctcgtcctcctcttttcctttttccctattcgcctcttgtcttcttttctctttttttgcgattttgctcacactgcgaattggaagtccgaatacggttgatcatcctcttgtataatcccttgccctctaggacgatgtccggtgcccgatttcaacgccgttggtcgaaggtggaaaaggacgtcctggtcgtcgtccacctcaccgcgccctacccttgggtaagagtccgagtaggatcgcgatttctgggatacatggctcgggagaaattaaggtattcttggagacaaacgcgatcgattccagtccgatcccgaggcacaaaatacctgagggtggattcgggattcggaagagcttgatacttaatatatacgacgatgaggtcttagggcagactttctgctcatcccactatccgtgacaaggcactctccgagaaagcgcttgcgcagaccaggttgacaattgggtctacgtaccaaatgaccgagctagtccggatgtgaccagacctgctgtcatggtggtgtatatgtatatgtcgttgtgaaactccgtcgttgttcgctcacttgtcctcttcctcccttcctaagcgcgcccttgtccatgattgttggttgtttcccatttaaaagcgcgtcgaccacaaaccacacaccccaccacctagtgacgagcgacctgctggcagagcgtgaaaaacctgcctgccatccactatcatcaccacacccacctatataacatacccacctcttcccccctttcccccgtttcactcactccatcccactcgtttttctcttttgaaaaaaaaaagaggagaagatgccttacaacggtatcggtatcgagactccaaggggaacgtgagtaccacacccgcctttcgagcatccacgaacctgtatcgctgacctcgcttcggcacacccctccgtagtggtacatccggtcatgtcatcaggaatctctctcacctccgtcctcgggaaggtcctcctggtggttcctcccgcccaggggatttcagtacgggcgccaactcgtttggtcctcccatccaccgggcacctgacgcgggtatcctcgatcacgagaggaaacgcaaggtagaggtcaaatgtttcgaactgagggaagaattggaagagaaagggtaagtcgagtcgagtcgtgtcgagtcgagtcgagtcgtggtctttagtcccggtcgcgtaccctctcgcccacctttcccgggtctctacccacgcccctctttctcatctcatcccatctcgtcatccttttcgacgacccccgtgacctctccctcgctcttttcgatcgaagtcacggacctacccacccgcaacctttttagacagtgcccgtacctctatcatctcaatgaggacctcgtggcgattaggtttttccccccctcttacgggaggtaggggaattcagcggagaatgacccccccacctcgacgtcacgtcttacgtgtcgccgacgggggggagaagcggactagagcttgtttcctctttctatcggttggatagacgtctccccccctttttggggggaggcgcgcagtggggaaggaggtgtaaatctgcagctacatactacacctagagtaggaccgacgcgtccctcgagtggttaccggacttttcttcttgttgttactttctctctagtgcctcgcttcctgtgttgaaccacgggtcgatacgcgatgctgacactttgacttcgatcttcccctcactgccctttattgcttcgggcagcctggacgaggaatccatcgactctcaggtcaattcactccgactccgtctctccgcccaatcacaatccacctcgtccaacccgtccgcccagcaatcgaagcaggatatccgaaacttgaaatctcacgactcgcacgccctcgccgcggccaagcagcaggagatgaataggatgggacgggcctttgggatcggctcgggctacgtcgaaggcaaggcgttcgatcgagccgggttggaggtcgagagggcggaaaggtgagctactcccgcgaccacgcatgtcgtccgaagggtcacccggactgatcctcgtctgattactgctcagggcggccaagcgggacgaggccgagcgtcaacgcgcagagatgatcgccaagcgtgaaaaggagagggaagaccgtgaagccgcgttcaaggagagcgaaaagaagcgtcgtcgggaagaatactatcggtaagtccaccgcggctggtcccggtcgggactgtcagacattgtcgaacacgcgctgatcgttgtgggttccctcttgtagacgactcgaggcggagaaacgagccaaggagggaccggttgcgggcaaggaaggattggattataacgccgatcgagcgccggtagcacgaggacgcgatcgatcgccctcaccacctccccgggccaggcgtcgttacgcggactcgaggtctagatcaccacctcgtcgggccgcgagggacgatttgcgttccccctcgccaaaacctcgacgtggtcgatattctccgtcacccgtaccacgaagacgatactcggactcgagatcaccaccacccccacctcgtcgagctaggtcccggactcctgtcgatacccggatgaggtctaggtccccgccacccggtgtatacctcaacccagctccggcaggagcaagaccccgttcgccctcaccctcccgctcgagatcccgctcggcaccccgcagacccatctcgaggtctcctccccgacgaagacggagggaaagcgattcgagcgggtcgagcagtgacgattccaggtcacctcccccgagaactcgacgtaggagcgctacgccctgagtcgagtcgggtgatcctccacgacgatatacgatcacgatcatgcgaaagacgaagcgttctccgttcgtcagaatactagtacatcccctttagttcgatttcagcgtcaaacacgcacgtcacaagttgtatctagtatcgtacatacgaaaagtttgtggtctacgggaccatcaaaagaatacatcatacctggctttggatataagaacctgcgccccgctccttaaggataacgcatcatccaagtgacatgctgcgtcggtcggagcgtggcccatcttgcttcctgtcacatttacgatcgcgaggtcgaagacagttcagtaatgcccgtaatcctgcgtttcaacttgatagtctcattgcagaagccatgttcaagaaggtgggaaacagtcgatcagcatcatccatgacgttccaaggtctcgctgcgctaagagcttcgaggtgaaaattaagggagagtgcatgtgcgtatcaaagaccaaagtaacgaagaagaaaacaacgtgcctcttgttgtgcagatcgtctatttcgactggaaacccgagtaccctggacccttgcatttgcgtacggcatggcttcggcgttgccggacatgctagattgcgggacgagccgcgttccccctaccacccgaggtgatctttaaactatttcatcttcatccatttcctagccatgccaaatggtcggccgttgcatacaagggaatcgtagaacatgtatctttatcaaactccgcgtaggcttccagatcggatgtgcgcactttaggactcgcagcgccagacagcgatcaagcagtacgagggcatgcctttgtaaagaacgatctaaaggcgggactgcagagactcagagactcgtcccggtctgaaggactcgcctcctttgaggatgtttgacttcgtggtcgtcgatagccactaccttttgttcagtatgctctgggaccgaataacgacctgcatcgccttgaaatcggcttgaaacgcgagatcgctgcggccgagctgaagcgcagcgcgacgtcaaggagctcacgaaacgtttcgaggagaaaggtcgcaacgtcagacaaagcacgaaacggctcggggacaaggatcgcgattgtcgcgaagtggcagtgcggatcgaccagaaagatcgcgacttcttagggggaacttgaagcacgagcggattctcccttcgacccccgcttcactcttcgactcgaattggaggatttcgtccgtccgagtcggttgatttgctggacatggtaatctaaatagaccgagccgaaatccgtcaaacgtcgatggtgccccttcacggtcgagcgggcatcttcgagatacaccgaaccgaaacacacctccatcatgacccgcaattgcggatgggataggtacggtgccctattctatctggctttctggaaaagcccgaggcttctcgatggcctagcgatgtattatgaccgaagcggggcacgagttgtggaggctaagatgtcgcagctgtaagggtagggcgaatcgatagaggatgacattgttgtcccgccgctgaaaccgtcacgcaatacgagtacgatcactagaaaagcataactcgatgaagtgtgatatggggctgtcgtgtatgccgttaaaggaagccgtggtataaaaaacaattacagagtggtccaccttgtgcccaaaagatcgtcaagctaagaactcgttaaatgtcctcgtgtctcttgacctcgagggttatcacgtggccaacccgccaaagacgtctttcaattcctgctcggtatgcaagatcttgatcccccggtccgtacacactcggagcgccttgtcgctagacgccttgccgacaccgcgaacggcgggttcgtaaaggtagacggtgaacgggctagattccctgttcatggctgccaatgccgtttgcgcgacgctgtgcaaggcaacgaagatgcgggttagaagagcgtcgaggaacgggatgcgaactcgcgactcgccagaaatccgtagcgagccctacgacgcagattttttccactccgagcttgatcaaaaagtcggccaggtgttccccgtcttcctgatccagttcgttggcggcctgcataccaagcaccttgtccagctcgggcgatccgatgggtacgacctggccggagaacgccgaaaaggcttcgatatccgactgcatgccctgcaatagaaccacgtccacgtcagcatggaatgatcgatcggggattcaggagggttttggggatacatgcgaacgatggcatgaacagctttgtgggtgaaggttgagtgacttaccttgcgtacgagcgcaaacttcccggccctatgccaaggctgaagagccgtcttcagatcctcttcgatctcggctccgcgggaatccttgacctgcagcattccgtccagacatggaagatcgagtgggatcgagggaccaagtccgaccgaggatggaacgtttccaggtcagatcgaaaagagcatgtagcgaaagtagaacgaggatcaaagggtcggcggttagtcacctttggccgcgggaggagcgagacgccccggtgatgtcgtcgccatcgggttttcgatccactcacgcaatgatccggccagaggttcagatccacctgtccgtcatctacaccctgagtggtcttgtaccctcctctcggatcgctcaggccctgagcgtcgtcttcgtcctgatctagacgatcggcgtcgtcgccgtggatgtcgacatgctcacccaggacgtccctgggtacacggacggtcgtaaacggtcgtgcgtgtggatgtttatgatgagatgagaaggagatgtgagttgggggatgccagtcctatagtcatggacaccgaggttgccgtgagagaaatgggaaaaacgtcagcgtttgtagtgatgatatcgacaatggccaccgtcgattcgagatcgggatgcgaaaacgccgatgccgactttgacgccgtcgcagactctaacgcaagatctgtcgactcacttgcgaggcgacgacaatatcccatacgttggccaaccattcttcctccaacagaccccttatgatgggtaggacgtctccaccttcgggcactgctaggctgccggtgggagggaggaaatcgttctggacgtcgataataaggagcgccgaggaggaggacgacgaggacaaggccgagggagacatgttgcggcaagtcggtgtgggcgtgatgatcgagtgttcagggggtggacgagtcgacaggaaaggtggtggcgggtgagacgatattgcaaagtagcttttgataaacctcgagtcgagtgagatccgattaccagtcaccggtcaagccgagctagtgtcaagagctagtacgaaagtgtgaatcgttgcgtggcgaacgagatgccgtggcgaagatttcaagggatctgacggtcgatctttactcgcattgccaaatcgagcttgaccgttctcttcatatatatatacacgtctgtgtgagagtgtatgtgtgtctgtgctacgtgctctgtgacctgtgaatctgtatatcatcctttgtcgcatggctgacaagactgacccatgaccagcatgaccaggaaggtttgtcctctctgacctgattccgggtcgggttggggtcgatactagaattgaaaggctgaccggggtggtcgtaacgcggggtggaacagcgacttgatccggctgatcatgcaggaacatttcccgctcgggttcgatcaacggcggaggaattcaaagttcaaaaagaagcggctggatggcgagtcggcggagatggacgacgaggctcaagatggacaggatggcatgatggaccagcagcagcatcaggccgtagggacgttgaaccagcatcatcagcagcaacatcaacaccaacatcagctcggcatgcttcacgcccagcacccgcacgcacatcaagtggggatggacatgggtttgacgggggaagcggtagattcggcgagaaagttggaagaggcacaggccgaggcggcgagggcgatcatcatgaacatggcgttgcaggcgcagatggccagtgctgggtataggacgcagcatcaacatcaacaacagcaacagcagcagcagcagcagcaacagcacgtcacgcggcatttgcaggcacaggctcaacagcagcaccagcaccagcatcagcatctcggcgtcgatgtcgacgtggatgtcggtgaaggatcgtccacgggcgttcatcatcatcatcaacaccagcaccagcagcaacaacagtcccatgaacatcatcacgaccatcccaacccgtcctcggtctcttccgccgcgggactcttgcaagaactcgccgatggggtgaacaacgaggatccgagcatcgacgcgttgagggaagaggcgatgagacaggtcgcccagatggaagggtaccgaacgggcgattatgacgaagggacgtatgaccgggtcgacctgttgggtggggaaggggtggacgtcgacgtcgacgttgatgtcgatgtcgatgtgggcgtgggcgtggacgctggggatgggaacgaaatgcaggacgcgcaggaagacgaggtgcatcagcatcagattgatcagcatcagcaacaagaggatgtcgatgcgatgggggtcggtatggggttggaggatgagagtggagtcgaggcctaccccgagggagatgcgcaggggtacgaagagacgtatgccgaggatgacgggaacgatgggttggagggggacgatgcgggggtgggaacgttggaagatgatgagacggggctcgaccaacaagatcaagatcaagatcaacaccagcaacaacatcaagaagaggtcctggacgagcaggagatcgaggggttggatcctcatctgatggaacatgggcatacgtaaaggtcgggccttgccgggtttcacgatcaaaagagatgggtgggatttgatgatgggcaggtcgtaggtttctctcttattagttgtataaagggtatttcccgaacgagaccttgctttcgagtgtagtctgtatactcgttgagctttgcaacgatatgaccatcgacattgacatcgacaccgacaacgttgacgacgatgttgttcggtcgacgacgagtctcaggcctcaactctctctgtctcatttcccactttgacccgcccactcgtcagattccactcaactggcaacttgcaacttgcaacttgattacattccgacaagaccgacacgaatccaacgcaaaccacaccacacaaaaagtcatcggcaagagacaaacctcttcgttgttcggtgatcatcgggcatgcctcgttctcccgataaacgctggccttcgcctagcgaacgggaggaccggaatcgtcgtccaggtggtggtggtggtcctcctccttatgcctcgtcatcgtcatcttccgccgtaccttcctcggcgagatatgattcgcggtacagctacaacaaaagggatgataggaggtacgacggcggcgtcgcgagtcgatatgacgatgatcgaaatcgaagatcatgggcgagtcgaccggggcctgctctaggagatcgggaccgggatagggacagagatagggacagggacaggagggatgtacggccagagtatgcggacaattacaagtcctcatacggacgagatagtaggtcatcgtcagccagtcccatcccgccggaaacgtcgtactaatacgtcccttcttgaccggtactacaactcgtcagacccccgctctgcatcctcagcaaccccagcagcttaccgtaacccctcccctatcccccactcgcatccctatcctcaccaatattcccactcgcatcctcacccacaacaacaacttcccagggtcgtctcacgctcgaggacgaaatccccgagcgtgcacaccgaggacgaagggtactccacggaagaagggatgatcacgcccaagaaaccgaaacccaaggatctccccggggtgtctacggggaagaacgtgaaaccctcgttggtcccctccaagaatatcgatctcgatctcgatgtcgacgtccgcaccgaagtgggggtcaagggcaagaccgtactcgtcaacgtcaacgaagacaatgcgacccctcggggcgtcatgctcacgatggacacggatgaagctgaagctggtgaaatcagggaagatgtcgaccggcccaaacgaaacgctttgaatttgccggtcaagcgacaagtcgagctggaggacggttccctgcccccatcactcctccccgaacgctccgaacagcagaattcaagggggtcgtctgtcaagagaggctcttccccgggacatgtcaacggggcgggtcattcacctacaacctcgcatccgggtcaagtagcgcttgacgagagggaacaagctcgagatcgaggtcgaacccgagcggacggggatgggatggaggtggacgagtcgacgatggtgtcgattcctacatcgtccgtgaggccgtcaggctcgggtgtggacgatagggctaggtatgcggatactgggtcgacctatggagcacggttcgacgaccgggaacgggatagggacagggagtacgagcggggtcgattgtcgggtggagggtatagtcgtggatcaggtagagggggacctatagcaccgggggcgagaggccaagaggatacgaggagacggtcgaggtcacggtcgagatcggtctctcgatcccggtcgagatcaccacgaccgataggacaatcccgaggtcaaatgcaaggcgcatcgactttacaccctcaggtccccctaggtcccagagcggaaacgcgttcgggttcgacagcggtgcctacacagagacgatcgcgatcgcccgcccccgtctcctccaggccttccgggagagctcgttctcgctcccgctcccgatccagatcgagtcggagctcttcctcccgttcccgctcgagatccagatcacgctcccgttcgtctacccggtcgagaaagatccctaccgctcccaaaggaccgaggaactttaacccgcccacgggtccaagcggacgaggagggtttgcgcctcgaggtggattcagagggagaggcggagcgggatatccgtactcggggtacgctggtaggggaggatacgccgctccggcttggggagctcgatatcccgctacaacgggggtcgttccgcccgccggaccctcagcggatcgtttgcctccctcgacaccggtcgggcctagtttggatcgggatcgggagagggaacgtgagcgggagagggagcgggaaagggaagacagggagcgggcgagagaggcggtctcgactccggtggtgggtaaatgggctgcgagaaaggtcaaggatgcggcagagaagactccagagacgccttcccaccgggaggacgacagaagcctgcctcccagcagctcgcctattcgtccgcttgatacggcatcgcgtgacgttcgctcgtcggccagggacgtcgaaaggtcggctctgccagaaaggaacggcgacgaggtcaagcgtgcggggctgagcaggcagggaacggggtactcgacaacagacgtggtcaagcgcgaagatgtggccttgccgccagtgaccgtcgacaagccgagacaagaggtccggatctcgttgacgcaggcgaccaagccggtcccagagatggagcgcaaattgtcagccatcccgagcatctcgacgccgagatcatcggggtcgcctctccaagcagagggtgagcgcaagatgcagcaagtgctgtcgccgctcggttcgagcgtgccttcccgaccgatcacgccgaacccccagacgggctcgatcaataagcaagaaccaggtcaaggatcatcctctaggccatcatctagtcatgcacaagcaacatcgcaacaacagtctcaaccccaactacaaaaccctcagccacagcgtacacgctcccatagacatattgaccggtcgtggcgaggttaccctgcgcccagagagatcaccgctcggccgaggcaggtcacggagatgcacttgcaagtgtccgagccggacaagatggccgtggatgctcgaaacgggcaagacacgcagacgacgatcaggatcaggacacgtgatgcgattcccggcttggagcatctagatgccgaggtgagccgacttttgggtcgagaccgtgacgtgacgtcgaaactcatttttagaccgtacgtcgctagctgacgagacttcgccacgaacgggacaagatgcactatgcgttccaatcgcaagcagcttcgtcgagttggaatcgattcgacgtggctctagcggagcaagaactcgaagcggcgaggcgaaagacgcaggcagccgggatgatgtattttgcgcccgaaacgctgggcccaatgtcgcccttgccttcaaaatgaacgagcagggcacgatcccgtttgcttctgaacccctggaccatatgacaataatgatgatgatggtgatggtgatgcaaaagagccgcaaaagccctgtgtgacgtttgttgttacacgtgtacatatatatacgcataggtgcagtgattccgcaagcgagtcgaatgagaaattgaatcacgccgagacgagcgacgatccgccgaatagcccgctggagagtacgcccagacccaagaggaagagcaatacgcacccgtccttccatgcttggttgacgagggatacgtaccgcgaccctgtcaggagcagcgacgagatgtgaggaggcatgagggggagaaagttggacaccatgcccggcaaagaagggggtgcctgtcggaacgcgggaaaaagtacagcggatgagtgagatggaagacgatcgctttggcggtgccaagagacctaccttgaataacatggcacgggtactttgaaggagaacttcaacagtcgtaaatgcccaaaagaccggctatgtgacccgaaaggagtggaagattagccctcatgccggttcctccctcttgacttgactgatttcactgtggctacgacgtaccaatgtggcaaacctcgtctgcctctccaaatccctctcgaggtttctgaatttacctccctcgccattcccgctcaacaatccgtatttggccaggttcctccagctccacgtcttgcccgtgcctacagagaggctcgagtgcaagcttggttcccaccagaggacgatgaatgcccagagagctaccatggcgagcacgtgtacgatggggaagatgcgctggatcaggggtttcctggattgttgcgctggagggaagagggcgttcgggttggacggatctccaccgccaaaaagaccgggaggtaggttgccaaagggggaacctccaccgcctgcaccgttgggaccctcggacatggctttgaacatggccgccatcgggtcctcgttgttagtaccagatccagggaaatctgatccgagtccgtcttgccccgacgtgatccctagcgggttgggaggacccccggccccgcccatctgagccaggagggccgccagtgggttctctccacccatacctggacccatcccgggagacccgccaccgccgagcatgctcatcatctgttccaactgtcgtcggtactgttcatcgggagaccccgccccgccaaaatcggaatcaggcgtctcgacctcgtccctcctatccgcaaacgccggggtcgacggaccacgagagcgacgagcggcgggttcggtgcggagccgagagtgatgcagagggtgaggttgttggatcgatggggacgaactggatggttgtgcgtcgggtgtggctggagatgccgtccgggatggggtcgatgaggctagatcggggatgtcgtcgagggtcagacaggtctccctagcggtgggacgagcagtgatatgaaagttgggggctcaccatcaaacaacttgctagcctcttcccccctggccgttgtagccaatctcgccaacccggaattccctgaccgacaaagattcgcgtatcagctgggcacctaatcggttctcgcacgtcttgaagttgaacgctcaccccttgccaggatttttgcctttcgagcctcggcccttcgtttcgcttcggattgagcttccgacatggtttactggttccaattagctctcgtggcgaacagtactacgatggggcttgatcgcgacagtgtatctgactgtgatcctcttgtcaatgttgacgatagcgtcacccttttgctcgaacttgaacttgtgccagctcactttcccaaatcaccggagccaaatttcgaaatcgtcactttttcggaagcaaatcgagatttctcgtcatcatcgtggtcgtggttgattcatacatctacaatctgaaacacagaaacacttcctccaccacccccttcacttgttctcctcctccttcatccccttcaacccggtatctttgagttcaaactgccatcccttaccctgtgtccattgatcggccccgggtacgggcggttgttccagctgttgcttggggaggtaagtagcgcgatgggctcgggtatgcgccgtatcaacgccgtattgtctgtatcacagcggattcgagcgaaaagaacgggggtggcgtctgagcggcgacgcaagagatggaatgatgagttgagtcgagctagaactcactcgtcacgttccttgaccatttgttgggggacctgagcgtcgttggtgtacgacatcatcaactgagggggaccgagggggaggtctgggtatttgtcgtattgccctatcaaccgcggcagaatccggccgacatatagacaaggcaccaagaagccaatggggacaggtgacaacgaagagaacaaagtcagcgaaacgtcacagtcaccaccatcgccaccatcacggaaactcttcctagtcctggcccttccaccttgtcctatttgactcgactctgctgaaccccccccggtatcttcaccgtgggatagctctccctatccctacccatactccagacccaaaccccaagcccccacacactcacccttgtaaacgacccctccgttcccctcggcggcctccctcgtccgtttctcctcgcgttcccgttcgaatcgtcctctcatctcggccagcttggctcgtttctcctgttcaagccgttcagtctcttccctctcgagcctgtgacgtcgtgcgtcgtggagaaggaagggggggggggtggaaagtcgggtttcagcgcaaagtgtcagcgagacccctcctcccctgcctgccttggaacgccggcatgaacgatgactccgactccgactccgactcacctagcgtccaactcttcctcggtctcttccctcggcgctgcacccgcacccgcacccgtacccgcgccgtactcatcgaccaaccctttcaactttcgacgtttatccttcttatccttcttgtcacgacgggacgaggacgattttttacctcgtcttcgatcccgatcccgacctttcgagggtgagggtgatctggagcgggaagacgaggtggatatcgaacgcgatcgagagcgggaacgcgagtcggatcgtgcacgggaaggagatcgcgagcggcgggattcaataggagctgtcggttgagctaggtcgagcgcataacaaaaaaaaagtcagaggaccagccccgcatttcattcgttcgtcagtctcgctcgaccgacatgtgaccgcctgggaaacgtgtgctcaccgaccgccgcgctcttcttgatcaactcgccacagttgacgatcctgacatcctcgacgggcttgtccttgctatccaccgagaccttggcgatctgctcgaccacctccatacccttgaccactcgtccgaacaccctatcatgtgcaagcgggatgcccggtcaacaccaagcttacacgacggcgacaacggccagcctcgcagcctcgactcgactcacgtatgcttgccgtccagatgcggacactcgtcgagcgtgatgaagaattgactcgaattcgtgtccttgcccttgttcgccatggccaataacccggccgcatcaagaggtgtgctcagatcttcgtcttcgaacgtcggcccgtagatgctctccccgcccgtcccgttgcctttcgtaaagtcgccggtttgcaacatgaacatgtctaaaaatgcgggggtttgatacggtgagccagctggaaaggcggtcgtccctgcagatgcacaaggcaggtataagggggagactgaccgatgacgcgatgaaagatcgttcccttgtaatgcatgggcacgtcggccgacttggccgtccccttttctccggtacacagtgcccggaaactgcgatcatcagcaaagaggtcgatcagctcgccacattgaatcgcactgaactgagccggagaaaggaattctcacttttctaccgtcttgggtactcggtcggcgtcgagttcgaacatgatccgctgaggtgccgccgtgccgatggcgacgtccatgaacgttcgcttggatggcattttgacgtactggattctaccgagatctataatcagcttcagggcctgatgatattctgcttgtctatggaaacgctcgacgttgtcacgttgatagccacgagttgcaagttgttgtatctccatctccaggttactcttagtctcccattcgcaacgttgaaaacgcataaatcgaaattgttctaaatttcgattttatgcgttctcaaaatcgaaatcaggtttcagaaaggatcatcaagagtctcgacaaccgataatgaactgtcaagacatcattcaatgacgaccttacgaagccttcctgcatctccactcacaattgacacgtccataccaacctcgaactgatcgtcatcatgtcgatctcgacgggaacgctcaatctcaagtttatgcaacggggcacgccgctcaaggcatcccctagcggtccttccactccgaccccatccactccaggtacccccgtacccgcatcgacatcgtcgacgagcgcgaacaaatctctcttacctgagatcgactctcaatgggaacttcccgtttccaagatcaaggcgttgagatcgggtggtgcggccgcaggcacgccgacgaatcccagcaagttgagagggaggatctcttacgagtcgtcttaccttccctttctcgaacgcggtcagccggtccagacgacgagtaggacgcgggtagatagcgaggacacggaagagggatctgatgaggacgaggacgaggatgacaggggagttgggagtagcaagatggtcaaggggaggatgatctttggccaacccgtcagaccggaaaaggtacacctaccctctctctccgtgttcacacccatgtcgctgataatgatgtgagaacctcctctatagaaggtctactctgacgacgaagagacgacacccaggtctcaatcgaaacacaacccatcgcaccgagatacaacccgatcgaacctcgcctcccggtccaaaccgcctccctccacacctacccgtaacgcctcccaagcccggtcaagcatgacctcgaacacacatccgacggcgatggcgactgcgagctcgagctcgacatcaaaatcgagttcgctagcgaaaccggacaaatccgggttcatccgtccgggcgggttcgacgacctgtccacccccacagaggatcaggcgacggggaagaaccggaagaagaaacgcaaatcggggcagatggtcgggacgtcttcccctgcacggaacgctcccaagacctcggtcgacgacaaggacgatgccaagaagccaggaaatgtcccgcacgatgtcgtcggcgaggaagacgacgaggcggtacagggtgcgagaaagaggcgtaaaaagtccaagaacaaaaaggacaacaaggccgccggcaagaaggaggacgacgctggtgatgcagaggatcccgagtttgaagagttcttgaacgatctcatggacgagattgaggaggaccgttagcaggggcgggtaccgcggggattgcagatctcgcatcagtatgtcatttgaagtggtcatagattcggacacacgtcctttggggaggcgaaagattcgggcatatgttcatatgaatacagtaaagttgcgcaaacaagtaaaggacttgaaaaattagatgcgaggtaagggtgatacagtttatgaaacgcagaatgaaaatgcaggcaaaggtgctggcgggggtggaaataatagctccggtcgatcgtcgactaggtcctctcggtcatctggctctctctcggggtgtttgcatcctccacctccccctcgaccctgcccaccttggcttcctcgacgaccttgcccctgttctccttccaccagacttcttccctcttcaacccccacctgacgatccacacgctcaagactccccacacgacgagccagatgaacatgaacccgaggatgaacccaaaggcgaacccgaaagtcaccgtccaggtgatcgcagcgaccgcgccaaagtagatggcactccccagagcccaaaaagcggtcaggtaccacatgaggtcttgccaaggtggcgaggcttcgtacctgacccgagagtcgaggatcagctcgggttccctcctcattccaactctgtcgtcccattgtcaaaacccgaaaaccgcgcggccactcacctcgcattcaccctctccctccactcccgtccatgcctgaagtccacggccccgatatcctcaaacatgtagaagaatgcgggtttcatcctcgtcccccgggcgtccgaggaacaccaaaaggggcattttgggcggaagagcgagatgagaaagaccaagccgacgggtccgatgagcatgggggtggacatgcagaaaaagtcactatggggagtaggtcggagagggtcaggttcggatgtcatttcaaagcggagtacgtcgggacgagtcactgacggcatgggaggtttaacggccgaggcgatggccagaggcaaggcaaagatgagcaaggcgtaagagtagaggtgcatggtaaagtccatgtgccatctctgcaaaggatcggtgtcgatgtgttcgacgaatttagccggggttgaacgtcctgcatttcgaaagagttcgttacggaacgagacgtacgacgggatcgttcaagggtccgtattgcggtcgatgtttccatactgtgatgcgtttcgaggatgacatcacccttcctgcgtcagccatgatgtcaaagatacgcctccatggccacctcccagggagagctcacgtttccaagtcctgaacggtccgtcgaaactcgaactgacacccagggtcgcactcgagattccgatcaactccctcagcgtcatgtgagtgtgatcacgcaggacgtagaagaggatgcaggggagggcgaggttgcaaaagaggatgaacccggcataggctatcaaagtcatccagcgacagagtgagagacctgtcatgactggatcgttgctcctgaagacgggccggaaacataccaaagttggaccattttcgatgccacaggttgaaccctgcgatcaaagggagccccgctgggtgatgatgaacggtatgatttgggtgagcgtgccgactatctctacggggtgtatgtgccacggtgggcggttcgtgtggatccgctgtcattattgccaacagtctagcttgctattagctagtcgttagatgatggtaggtgacgacgtttatttgacgatgatggttgaacatggtctgatgagcatattcatcgatgagaaatctatttctcgctcgctcctctttcaagtttcgttagcgccgaaatgacgtcgaccaccacaatcatcacccatcgccacgacgggggctaggtctcgaatgacgactacgatcgtgagtgacatcgacatatgtacgctgtgcaagaatacagttatatactaccatttcgtccagagccaatcataattgttggagatcgatcggagcgcaaacgttcctcgtctcacacatctacttgccccccggccgtcatcccggcgatgacgcgaggacagtgcccggcgcacggagtaagcgcactctcctcggtcgctcattcaaatgactaccaccgctcttcaaagtcacccctacgatggccagataggcggctctggaataagtgccacatcacaccgatgacatcgccattcgttacattcatacagtcatgaaccacggcccttccttctagatacatccacgcgttcgtgatatcgtcatgtcggcgcacctcgcacctcgtcgttcctttccaccgataccgccgttgcagaccttgcagcgcccgaccgtctacttggctggtagagcattcttgacgcagaaaaacgccatccccaacctcgccttcatcaccgcctcttgcagatccctctcgtcctgccccgtccacttttcctcggcgggtaaaccttgagcgccggattcacccaactttttgtacttgaattcaaacgctttacgtttcgcgttcaatcggacgacgggacgcgggtcgccgttccccgtcatgatgatcaggacggtccggggaggtagtgccgcgtggagtttgatcaggcgttcgttgagttgcgcaaaggcccgatcgaccgcggggtcggcgtcgatctcgatctcgccctcgccctcgccggcctgtgcagacgtcgtcgaggtctcaacctctggctcgaccactccgagaggtttcgagtcgtttgcccggggagtcgtccctacggaatatcccgccctcggtcagtcatctcccacacccggccggacggaaggagaccaagccgatcactcacacttttgcgcgtttgacagctcgaacaatctcgcaaatgtgaaatcaaagtcttcgacgttttccaccacgttcctgaccacctcgtcatcgtccttgcagacaaacgccctcgtcgccctcattcgggaagtcgcattgccataatcgcacaagagggacgatcggccgggttgtttcgagtccctcgcgtgacgtgaaaacttttcaaacagggtttccatgtcttccatcgtctcgccgaattccggacctggcaaccgggggccaaaggtgaagccggttcagtattgttgcgagatctcgacctcggacggctcgacgactcaccttcgatgcatttcctcttcaacaagtctagacacgccctcgcatcctcttccgaatcgtgtccctctccacccttgttctgaatctcccttgccaaccatttccccgtcaaccacttcaagctcggtttgctcggtcggcccttggcgtggggaaagaggagcgcggtatcgatgacgagcggatgtcggatcttcatgctcaacaggtcattctctagcgaatggccgaggaggatcgtatgcggggtgatcaggtcgggtcgggtcaggaaagcctcttgcacttcgggcaatgtcagggtcgccttgctaaggatttcctcggtgatcccggaccatctgtacggtcagtgaggggttagctttgttgggtgtcttgatgagaaaaagacacgcctcgtgctactcactgggtcttgtaatccgtgacccgtccttcaggcttgacgagctcgtcgtagacgaccttgcccgtggcgtaatcgatcgccgtcacccgtgtcaattcatcacctttggtcgtcatgcactgtgtcgtcgggatcgatcctgagctagccattccgcgcaaggtcttttctttgacgaggcaaggaagaggactcaccatctcgcaatcgacggccaagactgggtactttgcactctccggcggtccgctcgccctcttggtctctctccaaccttcaggcaacaccccactctcgtctccgctcgatcccgcttgccagggcaaaaacacctcgttgcccttctccacgactaactgatccccacgcatgaaaccctcgacggtgacggggaaataactcgggatggggtactcgttctctatcatctggttgggcgtcaagaggaacaagaccgggtcgaacgtctgactggattctccttgcgtccgatcggtggagacggaggtggtgggttggccgtggctattgacctcgtccagacgtttcttgaaagacctctgtttctccttgttccgtcgttccttttccttttgcgggacgacggtgctcaagaacgtattcaccgccggatgaaacctgtactgatccccgggggcgcgggtgggcagggcgttggagaacagtttagccatctggggcaacttgggtcctcacccccggccccgtttcctccttcctcgtatcgacgtattcatctcatctctcatatatcgtacccgcccccctctttacggctgcccctcacaaaagtaaggagcacacccgcatcgagcattcttctatttttccacggaccctagacgcggaaattagactagcagaaaaaggactctctcgttgaacatctacttgttccttctctctttctttctttctcactacccaggtttaccaggtgagtctcctggccaaactacaagaccccccttggtgtactcatcgaagaacctcgcgctccattcacccgcagtaaacaccaacacaacatcccttcaagatgacccgtgtctccgtactcaacgactgtttgaacaacatcgtcaacgccgaacgacgaggcaagaggcaggtgctcatcaggcccgcttccaaggtcgtcgtcaaggtcttgtcggtcatgcagaagcacggtgagtttcgaggtttcgagtttcgcgcaagtcacacgtttcccgactgggacccgggatataactgtttgatctcgacgaccctccgcgtcactaaacctaaaacactaccgagatcatcctttaaattccccgggataatgattcctcccacccggacatgggtgggggtacggatgcgagggtagtcgatttccacgcgaccttgattcagggtctctgcccaccccgtcccttctttaacgtcccgagcggggtccagaacatctctcgtccatgcccacgcgaggaggaaagatgacccccctccgtgctggttcatccgccgggggggtgctgtcggtcgtcctcgtgcgggtatggacagggtgtggatcgtatacgggacggtcggggtggggtgggaagaggatatatgcccggtggtttaaaggtcgtgggggcgttaccctctgttcgacattttctccctcccctgctttttgtttcccctcgttcgattcccggcctaccgggcgacgtgacgccgtgttcacaagcaagcagaccgatactgactcggcgcctcccgctggacctgcaggctacatcggcgagtttgagctcatcgacgaccaccgtggtggaaagatcgtcatccagctcaacggacgactcaacaagaccggtgtcatctctccccgattcaacgtcaccttggacgccatcgagaactgggtcaacgtcctcttgcccgctcgttcgtttggaaagatcatcttgaccacctcggccgggatcatggaccacgaggaggccaggaggaagcacgtgagttcagcgccgggtcgtttccatgctagggaggaaagcagatcgctcatccgtctcgctggccccatccatagaccggaggaaagatcttggccttcgtctactagacgcagcgtcgaatcatctttctacctaattccctttgggggtgttttcgtctgtgcagagaggaagagaaaaaaccaagagaggagtaggacgaagggttcgggatgcaaaggtctcgtcaagtcgggatgatacggatggacgcgtcgtcgctcgagcagggtctcagaggaggttgagagagggtgtttctttgtagtacaccgtccccccgttcctgtactcgccctgtgacggacgattgggtgtttgttcgatcatatcgatcgggacttttcgggtccccctttttcttcttctacttgccgtttcagccgtcgcttgggctaggtcgtttcaggtcgtggcgtggcgcgtctcgttcctgtccttcgtcaagactgtcttcttcgatatcactctgaccgttggtcagaccatgttcgtttgcgtggctttcggactaggcgcaaaatctctcaaaccaacacttgccgtcgatgttgtcctcgctcaccaaagaatgtctctcgtcgcgctggatcgaccaatgcattccctatctcctgacggctgaaaccgaataggctgcaaagccacggagtttagggtatcaaagtgactgaacattacgaacttctgcagcgtacaccccaggccagatggactggcgtcaataggtctcgtcgaacacggccttcaagccctttcctaaggcgattcttttcgacaggttgcgagagtctaagtgtctgttggaccaaaaatctgtgcggaacaccagttctcgaaaaagctccaccaaggcaataactcgcctgtgaagggacgaggtgtattgccgggagtttgactcccgcaccagttcaccccatgcaaaagcacacatcttcaacagtttgccataatgcttcccttcatgaaccccaccggtgatactggtggccactcttgccagacttcaagtcagaggtaattggaagaaggtaaaattactggtggttggccacacggtaaacttcaatttcctgagatcgtgcagattggagtcagacttagctaagtatctgactgttaccatatactgagcctcctccagtagggcatcctgtgaagtctcagtagccttcagggtggcaggagagcgcagtatccggtggattcggtccataagcggctgtcgaacctgcgaccaatgtcggctttccgcaactggcgaagcttgcaattgtttttttttcccagaaggggagaggatcgtctggtctgcttgcaaacatgaggcgcatcggtttaacaacatcattcgaagaagaagaagataatagttgaatgtgtgtcctgaggtgtgggtctacggctgatggagccggttcacgctgcaatcagagaaatcgacaggcgatacatgataatactcgttcgctaattatctgagagcgttggtagcgacttgttcttcggttgagccggtcgggactggaacatctgcgactggttgctatcgatgttcggtccctggacgatctcctctcacatacgatctgcatgtccatcagatgcggtcgacactaggcgcgcatttttgactgatgatgaaacggacttcggaggaaaaattaccactcattcttgcggactgagcgatgcgctgcgatcagcaatccacagttcgggaacgaacttgaaggctgggaaacagctagaatgtcgaatacgactgaaatgctttgtcatcattcctgggatccgcatcgcagggaacttgaacagcgacgagtcttgacgtattgtgacatcgcgcatcggaccataacaagacgcgaattatcgtccgagggtatacatacatactacacggagatggacgaggtcgtccattaacaagttctatgcaccgaccgcacgggcccaagtctgcagagcgtctgttccgacaatctcggtcaacttctggtcgaccagcgcgtcgaccgcctcgacgtgttcagccggtgttggggacagcgacgggaccgcgctctcaaagtcatcgcgcttgagacaggtcgtgcactggtcgtcgcgtccgatgtcagtcgacgacgatatgctgcactcgggaattgcctcttgagcacactcacgagcttgagatcccaccagaccctcgacttccaccctccggattgtaatacactggtcaggtcggtcgatgccgtgccgaccgactgctcgaccctgtcctccgcaatcaaggcatcacctggatcggtagccatttcgatcgctctcaagatggtcttgtaagccatggtcacgtcgctagaaaagaccgacgcatctcatcagccagatcctggaaatgtgcacggcggccctgcccgaaacgtacccaaacatcaaggccgtctcgccgtaccgcgtcatggtcatccagtcccaaggctccaacgtcattcgatgtgcgaggcacgtcatggcctgttgcaggtattgatcgcctcgcgccttgaccggcaccaactctcccgtttccgctccagtaaagtatttctgcacaatctgccccttggcgtaagcttcgtccagttggtcccaaccggagagcagcaagtagaggtcggccaagagcgaccagccatctgcgtccgtgtggaacgtgtcgaggtatttgaccaagagaggcaaggtccgtgcgatatgttgcggagtaggcgtcgatgagggcgtgctagtgctagaagccgagtctagcggttgatacagggctaacgtgatgagccgttgatgcgcggtctatagccaaaggcgtcgcattggaattgagcattcgatcgtacctgcctactggcaacccaaggcgactcacgataaacgtctcgtccgtctctcctttccataacgaattcgatgctttgcccttgcccttttccggcccgtccaacccaagaagggcgaggtacaacttcctggctccctcgtaatcaccctcggcctctcgccttagaccgtgcaacacggctatccgcggggatttggggaactttttctgcaggatcaagatctgggcctagaaagatagtcacgacgttcacgagtaagcccatggtcaggcggcgggatggagcagtgatttcgaccgacctcggcttgatctaaccgttgcagatccagagcggcgattgctacctgctcccttacagcccattctacgcatgcgttcacacacacacacccgtcaataccgacagcttctttggatgctagagatctcgacaacggcactcaccctgatcgccgagacttcctcctttcaacgctcggtcgccgagttcgagcacctgctctgaattccgagctcctaccgttcggaacctcgcgagcttgtccaggatggctttttgtgacatgaccgtcgagggcagggaactatagacttttgattctctcaccaggtgatagtgtagagaagtacagggggcaaggcgacagacatgattgatcgaatactgacgattgtgacgagatgaagtggtgagcatgctggccgttgagccatcaatcgaccggaagcaaacggtaacaacttcgtgacaggagaatcgtctctagaccatctgtcaacactacgacatggtcgagaaagactcgaaccgcaacccagcacatggccaacgaacgccccagattgaccgaacgaatcaagacgggaataatccacttcggtcgatcacgacaacaaaacagtgctagagaaaatgggtagtccggatcgcgtagcgtacaatcccaccgggccaggttcttcccccatcctctcgtgctcccctacactcactccagctcttgtccgatctctgcgtatcgcgcgagacgtttagaacctgagcttggtgaagactgtatgtggccgcaggaacagcacaacgaaagatgtagacgaggtcggatcagtccttctggcaatcgtttcaccatcgcgaggatcacacggaggacttacaccacctgttggctcctcgggcgtaacgctcctcaaagtgcttcttgatggccttcttggcgtcctccctctgagtgggctccttgaaagtctcggaagagacggttcccttcaagctctcgagctcgagggcgtatcgggtggggaggaggtgggcgtagttgacagtctgttaggcaatcccgaagacgaatcagcgtcgtgtatgcgaatgcacggagcgctcgggctagacgtcgagactgaccttgatgaaaggcttgatcttcgatcgcctggcaattcgcttagcacccatcgacttggtgaccttcaaggggtacctgcgagtcgcaccacgtagtcgtcgtaagtacatttcgttcgcctttccctctgcggcgcgcatgagatctcgcccaggaattcatcggactcacttctcgattccggcaacaatggcgtgggggtaaggcctgtccttggtaccctcgtcgacctgcttgatgacgacgaccttctttccagcttgacgtccagagaggacgacggcgaccttgccgggcttgtagactgtgcatgggtaggcaatgaaaaagtcgtcagtcgatgcggacgttgaaagcttgtatacgacggccggtcagggacgtgtgtgtatgtgcgtgcgcgcgtgtaagtgtgtgtgtgtgcatgtgtgtacgtggacggagaaaaggtttttggcaaactcccgcggaccgtctcgctccagtcgattcgagttgatttgcgtgccgaaagacgagcttcgtagcaagtacgatccatctcggccgcccactcgatatggtgaccgagccgatgtcccccgaatcgattccacatctgatccggcgcggagtggtcggaccgtgcaaaggcctgagccagtgtgtctttttccattctcagcgccactgggtgtgatcttggttgggttgggcggtgtggccacgacttgtcgaatgctatctcgagcaagatgaagatccagcgagagggtcgtcgatccatcatttcccctatcaaaaaggaagatgggatccgactcgtcctgcgcgtatacctctccccgttcgggtctttgcggaatcctcaagccgaatcgagatcaagtcctagggcgagggcgaaagcggggttttcgacgttccgtctccttgtacgtcgaggtcgaggtccgaccctcgtccatgccatatcccccatatccacattctctcccttatggaatataaagcgagtacccgatcgttgaacggtgccccccgtcccgcgtcaacgagagtgaatcgacagcccaggccaaaagtctcttccagtgtccccctcctgtctgtgtctgtcgattcgattttcctcggccggtgtcctcgtcctcgtacacacacacacggcacagcaccagcacagcaccagcacaatacgccacacacgggaagaagggaggtcttctgcactcggacactcacctagagaaggaggaaggtaaggaggaaaaaagtcgtgagacggatcagtactcgtacggtgggaagagacaggcgggggtgtgggatactcactcttgaccatctgtgataggtgtgattggcagttcgatttcgtattcgatttcagtttgaccgggggtggttggataacgatgaggacgacgagcgggatgatcagctctcgaacgattgagacgcaacggcccagacggactgaccttgatcttttgttgtaggttttgtcggaggaggaatgggtgaaggtagagagggaggtagaggtcgaggaagggtgtggccacgagatcaggacggattctgtacgaggtcgtttgatggcgaccgacgaggtggtggtggtggtgtggttgtcctggcctggagtttattgctgtgtgtcaacgtggtgcgtgatgatttcggtcgaatcaaaccccctcaccctccccccccctttgactcacgcttccggcaactctcgcgcgatccacctcttgttcggtcatctccgaacacaggggcaggcagccagcggctcaaagagggaaacagggccgacgagataacgaccatcgaccatcaactaggccacggaggtgccattgatcatacaccgcggatcatgtgcatgcgcctcataccaacaccatactgtccactacggaataccctaccgccactccaccctcatcactctccctccctttcgtcctcaacaacgtccccgcgcccacattcaccttgacctcgctcgaatcaaacagcgccacaccgtagactcccaactcgctgaccacctcgcccgatttcaccttggcctgaccacccttgacgagcaagtttcgtaaacccaagggaggctcgatcaggctcatcaggatgtacccttcccgctttggcggttcctcctcggccagaggttccctagcgagctcgtctagaaacccgggaatgtccgctcggtagatattgttcccccctccttcccgctgaggtttcaacacgtacccctccggggccgtcctcgccaacccttgtgcgtgggtacccaactcgctatcgtccatcgggtacaacgtcgtgaacgtctccctcaacccggcgatatcccccgtcgaccacccttgccctgcggggaggtaccgctcgaccatcccaggctcgctgagcacctgttgcacctttttcgcaccggccaattgaagcgccaggctgggacactttatcgccctcgatcgctcgagcgtgatccgggtggaccagtcggcgctcgaagtatagtcggtaggcgtatacccggctcggtagtagatgacggcgatttcgatcgggtcgaacgaaggggagagcggatccggtagtaagagacggtgcgaagcgtctgtcggtaaagaagggacgacggagagttccttgaacgtctgtcggatgaccctgatcccgtgtctgcattggcaaacggaacaacgtcagctgcggatcaactgccgaaaagtccacatcgacatcgccggggactgacttttccaacaactcccattccaaccacctctgatcgaaaacgttcctctcaccctcttgtacgacgaacaagatcctcgcggtttcactaccgtacgctttccacccgtccgctagaccctggacgagcgaagccagcgctcgattaggtgggaatctagcagggtccgggtgggtcaagtggggcgaggcttcaaagtacccggtagagagggataggtagctatcgaacccatatgtaaagtcgaggtatgcagtcgtgtttagcaaaaaaaaaaaaaaggtcttgccgacgactcgactggagtcgactcaccgatgcaggtccccggccaattgactcagcgctccaaagctcgacgagatggtattgaattcgacctgtttcaattccaatggcgaactagcatccgaggacgagctgtgcaagaggtaatctgatcggaaaagacctagttggagaggctgtacgggtcgagttgattgtatcgcgatagcaatagcaatcgcaatcgcaattgtgtatcgtgtcagccttgatcaccgaccatccacctcgggatcacgatcgccgactcacctgtacgagctcgtccctacaagacttccaagctctccaaagttccccctgaaattcgtccaccttgctgaccaccccacccatgaccctgtcgaggaactcgatatccctggcgacattgacgtataacgcattgtaagccggttggatggatacggccaggtcgtacaggtccttggggaaaggactcggacacaacgagagaggtgcagggatcgacgaggtaggaacaggacctgtggatgcggtgtgaggaggcaggagggtgaatccgtgtccgagcgcataggtggtcgcgagttgcaacaggtaggacgtctgctctggcgtgaacgagggcggccattcagggagctgacaggaggacatagcgcagggttgtcgttgtcgtctagcaaggagcaaggtgaagctggtggtgattgtcgggatgaaggtcgaatgatctcaactatcgagagttgatggacattctcttgtgctggccgcgcgagggtttgtcaggcaacaaacccccgaccccgccaacctcgatcgtggtcgatggcgtgattactcatcggcaactcggtaggtcatcatcttaccgttctgttcgttcgacatgatacaaaaagcgcttcagcctgtaactcgcaacccgcagcccatcaaactgaacccggccgtgacaatcaaaaaggataggcagagacgattggtgattgattcatgtccatatcgccttcttgatcatgtccaagcctgaccacccgctaaaaaatacttgatttaatggaccgctggattctttactacctcctacaatcgcaaattctgactctgctttacattaccggtcatacgtcgctggctctcttcactgatgagacagttcgtggggatgccaagcgaccagctcctccacaggatcgggatactcggaaagagtagcaccacataacttgtccacaacgagccgcaaggatacctgctaataaggcatcaccgacgacctccgtctgtcttgacctagcccacaagtgacgatcagctccatgcaagacaatttgccaacccaactagttgtcagaaagaagatagggtgtaattagtgtggaaccgtaatgaaagatactggtctcatacctgtgtcagagtcagtcttatcccctccgagaagccgcttcacagcaatatacctagacgtgttaagtcttctgctgttcgttctacccagagcggtagaacatcaatataggcctgctgatggaactgagagatacggatctccaccaagccttgttgtcccataaggtaccatctttgatctaggatcccagatagtaaccagtgtagtagtagaagtcccgccaatgatcacggcaacccgctcaataaaatcgagcggtggatcgatcaatttcgcgcttgctacaatctggagaacgacccttgtctttacaagatcagcttcgactgtgtcgcgaatcctccaacgagctcgtcaacccgtgctcttaagggagaagaggcgcggatcgatggcactactcgttgatgattattggggtgtaccctctccctagcaaacaaccatccgggcgccactcctggtcgcacgatgggtcggccgaaccgttttacgtgcgatggatatatgcatatgaaacctgccgatctgtcgtcgatcgtacttcattacgccttcgccagctccttcttggccgtcgtgatgagcccatcaatctcgctcgtatacttgtcggtcagttgctgcgcctgtaacgaggtcgagatcaagacgtcaggaccctggcatacgttcgtgagccagagatccagagaaatgacgcacctctttcccgctcgggctgtttttgccattcttgtgcttgatacccttcaatgcgtccgtccgagcgatcctgacctgttgtttcgcctgttcggccgtgtcactaatgtgcttcacaatggctgcccgggtgtcggcggtgggtctataaccgtgatgaacaggtgtaacggataagcccaagtgacgaacgaggaaacaagctgttggaagacccgcctcgagactggtatccgtaggctcagcttgtcatgctttataggactgatgccaggtaggttggccttttggatcgccgaatcgatgtgtttgaggctctgcacgtgaaggaggatatagaaaggtcagtgtaacgacgtccaggcgacttcgaatcggaaccgactcacaccctcatcgtagacttcgacccagagggcgttctgtcggacggtgatgctcgctatgttgacgatgggctctggcgacgggtaatctggcaggggtacccgaaccgaatccaagatcgctaaagaagacaggaacctcactcccgtcagtaaacagactttggattccgggagggcaaacatcatcaacgaacactaacccggactgatcctccccgaaccgcgttcgacgccgtcaaagacgattcctcggcaccagctgacgctcttttccattttggccttcatcttgtcgaccaaagcctcatcgtgagcgtcgatagcgtcgacatcaccgagatcgatgggctcttccccagcgaccaagtctcccttggactttttactggcagacatcgagacgccactcttcgagctcgccttgcccttggtcttgatcacggtcgtccccacgtcctcatcgtcgtccctattcttgccctttttcgattttttggcataagttcgcacatacaccggggtcgagttgaccgagggcactcgagggatcggtcgagaagcaatgacagagctcgaggccaagcagggtgctcgctgaacagcagtcctgcaaagcgtcaaagtcgctcgccccgacgtgaatattagcgacatgacaagttggtcaaagtttacaacaagatgtcgttttccgttggcaaggcgaacggacgacttttcgacaaataatcaagaggcagggatcgcaacagtgacttttgccattcgagatttgtcaaagttaaagacatccgtcaacgttacgtaatcgataatgatgacgttttcggcgaggatctgatcatcgatcgtgtttggctcgaagcatacaagaggtcgtttctgggctgagacgttctcgcaagagcaccatagaactcgtataggttgattgcgaagacattaagctagacgcgttcgcggcggtagggtatatgggtttacggaattcatgtgatgaggaccctcttgacgggtttcacggtaggtggagagggcctgcgtgagacgatgatcagcatgcaagcgtgacagtggctatgaaccgacggaggatagctcacagtaggttcccattgggagattgagctgccctggccaggagacgtgtttcgaggagaccgcagacgtgtctgtttcgtggacgaaacccgtgttcagcaattgagatagatgcatgtggtcgcgcgagacaggagcacgacgccgacttactttttgccgtctcctcctgctcccatccctatacggcattctctcgagcaaaaggtatcgccgcacctggaagaaagacggacggacgatcagtcaagcgtgccaaccgtcgcgatctctaccggaacatactttcggcaactagggaaattgactcccttggcgtgacagacggcacacacgaccttttgggtcatggcgctgctcatctcggcctccaacagcctcggatccataggggccagaggaggatcggatgcgtcctcgaacgctcgaggcgtccgtttgggagcaagtggtttcgcatcgaccctcgggtgttcatacgtcgactcggcaccgcatggggagacgagaaggggaagttgcctcgatgcagcgggtgttgcagcaggtgtatgtgggagagcctgcttgtacccggactcgcagacgctatccaggtcttgcccgtagctcggccgggtttccagaacaggtttggacgtcgaggtctcctccttgttgtcgactgtgactgtcaacagcctttgctcctcgtccaatctcggactggacgctcgaccgctctcacgatcggctctccgttccgaccctgtccggctattgaatcgtctcgtcccaaagttgaaggttgagaaccaacccttctccgccgatttgcccggattcaacgaaccgccgcccacgggctctgccaacccgatcgtcgtcttggaccccgtatgcagcacgggcgagctatgttgagcctcgatagcggcattgcgctgataccgcctcaacctctcttccgcgatggacaacccgctcgatttccccgccttgggaaggtcgaccatgctcctcatcctcgagttcttccttgccgacccgagggtggagaactcggcatgcggatgaccggcttccctggctcccatctcgttggcgacctgctgagagagctggggcagactagctgtagacttggtcaaaaacccatcccgggccgtcatgttcgatcggatggaacccgaatacgacatgaaactccgcccggtcgtcgtgccgttggattcggtggaaaagatcgagatcatgctcggccgcgagggaaggaagatgggtctccgtgcggtagaatgggatgccaaactgtaccgatctgcgtgaggttgagagcctcgggggaggcgggaagaggacgaaggggaaggaggatcttgacgggctcggtaacgtagtcgaggatgattcgtcgagacgggcgagacgggagtggaaggtccagaatcctgtatgataggcgattcggcaaagagcgagtcgagaatcgagtctgcgctcttgaggtaggtcgggtatagctcttgcaattgaagcgtgtagaacgaagtgttgttcgccggctgagtcttgcagagctgcaacgagatttgagcgagtgaaatctcgtcagccttgatgcctcgcctgaagcgctgcgacgaccggtgatgccggactcacgatatacaggcacagtgccagacaccccctgaccagctctccttgctcgtgcccctgatccggtaccagctccacctcgtctttgatggtatcctgtcgacaatgaaacgcaacgtctaggtccatcaatccttccagggccaccttgaaagctttcgccagttccgctccagcctgaaaggctgtcagatccgtttccctaacggatgtcccgtccagcggtctgatggtcgtgtgatcttgcgaccgtgttcccgtcgtcccgttcgattgaggtctgtaagttactgtagaggcgtaaagctgggtagtggagaggtcgtacagggtctcgtccgtgcgggagatgcttcgggtttggtattctccagcgagcaggcagattagtcggaactgcagagccggcaagtcgaggtgaaaacgagatgtgtgataaagttgcgaggcgaatgtcatgggcgtcgcgacgatcatcatcatcaaatggatatgaattgatcggtttgcgtcgttggcggtatgaagggacaatcggcgggcgggggagcgttggagtcgggcaagtcgacaccacccaaatacgcaggcatcggtggcgggggaggtggtggaggcggagcgtctccatcgggatctacctcttcgctgtcatcttctcgaactgtggataacgattggggaggcagaggagagctttcatctaaggacagacccagcgccttcgccttgcgtgccaacgattcatcgacgcccgcatcccgttctgaaccgttccttgtgtgcagtgatgatatcgaggtggcgggtgtccctgtggcagccaaggagaagccgctgtcccgcaagctggacacgatgctctgttcttcctcgtcgtcgatttccatgtttgcgggtgccgatgcgctcctgacgatagatcggttccgcatcatctcatcgaggacgttagaaaagccgggatgtttggctaaattgttgctgtagcggtctttcgatttgcgtccgataggaggcgggctgaggaacccgtttccggacgacaccgttgtgagggcctccaggttgacattacggctgcgagcgctgcgtggtaaggagccacgcgcacgcactggtgactgggtagagcgcgacaagggaattcgataagctaaaatgagaatcggggatgaacacaaatcgcactgacctgctcctcgttcatcaggcgctcttcgatatgagccttgacattatcatcatctgcatcgacgaactgggaacccgaagatctttccatagacgttggcttgataatgcgtggcatacccgcagcgaacgacgtcttgcgccgtgcggaaccgacggtaaccttgtccgcccttcgaacctcggcctcgaacatgtctccgtcatcgctggcgccgcgtgaatcggaatcgaatccagataatcccgtatctgagcgcttgggcgtggcatgcttcccttcaagctgacggatcgtgcgagctcgctcttgttgttcttcgtacttggctaccagagcgaccctatctttgcgatagcgaccgaccttgttgatgacgtcgtcgaatctttccgtctctaccagcatctcgatcatctcgtaaacgtcgaggcgcagttcttgggcatcggacacggattcttgacgcatgcgttcttggtcctcttcgagactattagcattgttccgggatacacgcaaacgctcctccatctgcgtcagctgggttttgaggttgccgaccaagcccccgttggcttctccgagctcttcctcgagttcgacctttcgacgctccaagcgtccgacctttttctccagctcgtcaatctgctgcatggctgtatcgagattggcttcggtctcgaagcgagagaacatggtctgtaccgttacgccagcttgtgcggtaaagtccctgtcggtgcccatctgaccgtccatggtgatgcctgctacgagcatattgatgagctggtagtactttgaccgatgctcgggctcattctcgatcaaggtaaagtgacgtagaatggagatgaagtacgtctctgccggcgagcccttcatctgtgacattaaaccttgaaagatctctggcccgttgccaaggctttgcagggcgtcgttattcagacggtgtctttgttctttgacgtcctcctctcgaagctcgttatacgtcctgatctcttgattgatgagttggttgttcaatgctagcaatttggggaagatggcctcgactccagcctgtacgagctctattcggatgtgcattcgctgattgagcccggttgtatccgccggcaggtttttggagcggaccgtcaagagaccgttgacgaggaagagattactcaactggacgagcgagtaagttaattcttgtcggctcgtcagggaaatcaacgagatggctcacagcgtattccgtgagcgcggtatcgtcgaccggttcggtatttgtagtgcttcttctgagctccattcccgctccgaccaagctgcccatgacaccacgactgctgatggtcgcctcgaacgccttgagccaggtggcgaatcgattgacccccttgttgggcatatccagacctttctcgtatgtctggaatgaacgcaggacgagatcgtaaccctcgggaatgtcgtagtacagaaagtaggtcaagatgtcgacggcgtatttacgcgaggcgagttgaggtgacaggacggatccgaggatgcccgtcaatatggccggcttgttgatcgcgttatctgccacgcgctgaggagtgacggcgagcgatgtggtgacgatcaatcactgctcgtgtgacgcttgtgcggtgcggaatcagacctaccgaataaccacgattgcacaacgagtagatgcatttcaacgtcaacaactctccctgcgtttccgacccgtccgaagtgtttctgtgatgaatgagacgagctcgatcgatacgttgcatctagcgaatggacaggagcctgtgggggctaaacttacttggcccggcgtttgtggatcgacgacaatttcaagctaagcatgtacaggccctgataagtttgaataaagtcgtccacccaattatcgatcgctctgggaccccccggtcctggtatcagctcgagcgtcggtgacggcattggcgagcccgcggtcgactcactggaccttggaagtcctcaacatgatctcgagatccctcaactgtccgttcgtcaacttgttgttcatcatctgtttggcgtagaaatccggtggcgtctgttgttgacgtctggtggacgcccattgggacctggcgtcgctctcgatgatcatccatttcttatccaagctcatggactgaacgttctgataagtcgacatgccggtcgagaccgccgacgagttgcgatggtgggacgaggcggcattcttgttgtcgctcgtagcgaaatcgagcgctgccatgaccttttggaacagcctctcgatctcggccggatctttgggtcgttccagggtgaattcttcctggatcgtttcggggagggtgatggacgaggacgagtgggtaccattgttatagatcgctgcggacccgttcaggttggtcgtcgaggacgaagccgaggaggcgtctcgactctgcatgacggtctgattcgagtgccgggaactcgagctcatcgaccggtctgccgctgggtacctggacccctctgcgatgatggacctcgtagaatggtctgaatctcttctccgatgtcccaaactcgggttggcgatcgacggggtcggggaaggacccccctcgcgaaggatgtgcaccctcgaccctgtcgatcccgtcctgccgacctggtaacgacctcctgttcctcctcctcctccacctcctgtcccaaactcttcctcggcatcgggactcctcgtcagcttgcctgccagctcggcccgatccccagcggtcctcagaaagtaatcgtttatcgtcaactcttccctcgccgatccatccgcttgcactacgggatcacgttccaactgcgggttacccagaggtttcccgatgatcctcgtcgacgtcgaattggaattcgagctggtagatgccgagctattcctcgcctgtctgccgaggctaccgatggtgccccccgtggccacgggcaagctacctgatgagctgatccggtcgtacgggaccgaactgttccccaactcggtagggacggattcgaccgactggcggctcttggaggacgatttggacgatcggaagaggttgttcatcctcgtcgactttgactgacggtcctagacaatggcgattgcgactgcggcgggcaggacgatagtccgcgttcggagagtagagtcggagaggagggatacaagtgcgatccgtcgctggatccgcttttgaaagaggcaccccctagcgagatggactccgctacggccaggtatcacgggctgatctttgagggtcgggctttgaatgatcaccagatcaccaaaacttgattcttcggtcgacgacgtttcaaccgacgtcgagccgcaggctgtcgatggagattccgtccatgcagtgatgagctatcaggtaggtttcgttctttgtttatttgcgaggttgacaagcgggtgtcaagaaatgttgtctgccgggactgttcacgcaagacgaagatcaatggcaacgacgacagtgagtagtatcaatggtttagaggttgatggtcgtcgtcgtcgtcgtcgtcgatggtcctagcttaggttgatcgcgtgaatccgaccgagccgagcgttcgagcgagtgcgcgatacacgatggattaggcgtgggacggatacgagtctggaatcgaccacgactttgtgactacagtactactctgtttgctaacgagtagattgttgctgcttgctgctagactgatgcatgtccgatgacagacagggattactagccaacctttttgctagatggatgggggattcccatcggtgagtgaccaaccgcgaccgaggctgaggctgagctacacgagtaggttagtacactactagtactcgatcgagtgacaagcgtgatcgacaacgagcgaagacgacaaggctccaagggcaacgcaaggtagtgcaaatacaaatagacagcaacgatactatctgacttcattcgcctcgatcataatatcatgacagtacaatagcgtactctcatatcgcatttctcattcacgtgcaaacgatgccgacgagcgaacaacagatcgctagcctacagctacaaaacccccaccacgctcatgggcggcctcgctcctctctaattcatctcgaacaggacaaactcggcttccctcccgcctacgctctcgatctggatgacgtccccctcgaccccaccatcgataaacacgccgtccccttcccctaggacgacgcccgtctcgcccccaaccttgacctttgccgcatcggcatgggtgtagctagcccgggtgttgtacccagaagattggaccaggtggacgtacacccgtttactctgcgatggactggcagaggggttgaatgggcgggagacggtatgcgagaccgaggctttcggggtgagtagcgaggccgacatggataaccacgagtggacctgcgagtcgagcgaggtcgaggtcgaggtcgaggtcgaggtcgaggtcgaaagcgaaagcgaaagaagaagatcgtgtacgtcagcgatcgcgcctcgaccctgcaactccggagggcagactcaccggtgcgggaccttccccttctctctcgtgcttgaccccgtcggcacctacgggagcgacgaccctgaccaacttgtcccgtttatcctcgtccgagacgtgcctggtgtaataccccggcttcaaccctctcgtatggggcatcgcccagatctgcaggaaatgtacgccttgcttgggatgatcgttgtactcgctatgcctgatccccgtacccgtcgaagtcatctgcagatccccacgtttgaggatctcggtattgtgcagggaatcccggtgggtgagttgtccgtcgaggatgtaggagaagatctcaaactctcgatgagcgtgcgttccgaatccttgggtagggatcactcggtcctcgttgatgaccctcaagggaccgtactggtcgaacccgtcgtcctggtagttggcgaaactgaacgtgtgaaaggtcttgagccaaccgtggtcggctcctccccgttcttcggatttacggggagtgtatttgaggttggaggcggtgggagtggtggtggtggacatggtacgtctgtcggtacgaatagaggacgtgttgatggcggtggtgaccgagccaaaggagggagcgagtcgacggagtgcggttcgaccgagaatggcagccaggatgagtggcaagacgaggtagagtaagagtttcttcgagttgggatgacttgtctgagggctagtaggtccgttcggtcgttgtatagactcggagctggtgatgtgtgtgtggtgggaggacggaatcttggtgaaaatgatttacctcttgtcgatcgaggtcgaaagtggtgtggttatatattcgtcaaggatggacaaagttggacgagagttgagaggcgtgagattgattttcaagatgtcgtgagagatatagacgttgctagtcgtttgaattgacagtgatatatataataatatgttgcaaagtcacaagcttcatggtcatggtcatgcaggtcatgatttgtagttgttcccacaacaaggtggcttaatggctcggtacctctgttctgtgggaatgatcgctcatcgcttggacccgagcgaggcctagctggctggcggtggctaatttcggaagtaaattgtcgtattactcatccttctcacacgcaggaacacacgcgcgcgggagttcgagtgagattgaatattcatttcagagcccaagtgcctacaccctagctaactagctagccagccggtggcgttggccgcgcttacgtcagctgatcatcatcctcgcccgccgtttcgctggcgatcgaggcagagacagggggaatttctagaataggtaggtagctagctagctagctaggtagcataggtaggtagagcccagttggtaatctaatcggtacatcccccaatcattacctcgccatccaccttgtcatccgaccaaatctcgacaactcgtcatccctataatctgtcgatacgagcccttttggtcggaagagccggcaatagaatagtatcataaggagaagatcgttcaaccaaaaaagctttgccccgctcggctcttcgacttctcggttctctcgcggcttgggggcgacattcataacacgaacgagaacgaccggcaaccggcactctcgacagatagacaaccagacgacgacctacggatcgactggaaagcaagacctaatagacctggattgacaacagaggaagaagggagattacctctcccccttgtcgctcgagttatatcggtcagatcgacctcttcttcaagccttgcgttgattcggggtgggaatgggaattacgatgcgatgcgatgcgatgatgaccgggatcagatgggacgcgggtgtccaggctgggcagctgggccaaagggcgacattcacctttttgcgagattgttgtaagcgagagcgacgttgaccgaaagcgatcagacagagacagagagatcaagagaggacccgtgggggggagggggggggatagccatgacttttagtcgcaacactaccatccgacaaagggtacctacctaccttaccttacctcatacaagtctaccccgctcacctaatctccctttggaataccctcttcctagtcaaagggcaacccccgcgcaatccgcctgaacacaacctctcgcttgacccgctctttcaaccgacccaacctcttgctgacgtcgaacctcccagcctagatatctacatcacctcgaccgacgagcattcaaccttcgttactgctactactagatctcataacccggcctcaatctcgcacacctaatcatcatggcaggagcaatcaaaaaggccgctcaagccgtagccaacgctctccccagcgtgacgaccccgagctcatcctcgtcctcccggccgaccgagatctccctcccggcgtcgaccacgttcaccaacggcagttcgtcaaaatcgctggccactccgcgaactcctaggaccccagcggatgaagccatcgcttacttttcctccgagggtcaacagcaggaagaggttcagatctgggagctccccttggaggacgacggtgggcctaacgatgccaggagcgtgagtcttgccttgctcttcggacagggctcgaaccatgcatggtctgaccggaaaagatcactcgcgttatagtacatccgactacctcccccgacgactccttatatcctgaggatctcattgtcccccggctcggtgggcacccgaaacggtgtactcaagtcggatttccccatcgatggaggcgctttcgagcggggcgtatggaaggagagaaagttgccgggtgatgtgaccaagtgagtctagcggccggtgtctacgtatagatgcgcatctcagcgagacgcttaccatcgagcccgacctggtaggcctatcaaggtcgacctccccatctcggcacctggagctttctgctactacattgaatacgacgagacctactctgccaacacctcgagcaagcgtgtgcagagccggaaaggttacttcaacgtcgacccgatcatcaccttgcccgtccgaacgtccttgttcgaggacggctcgctcttgtcccagcccaacgctttgctgcacgataccaagcttggcaaggtcgcctctccggaaaagacggaaaacatccctctcgactcgatcgccatgttgtccatcatcgccaaatggcaaggtccgttgaacgagtgggacgcgcactttgacgaggccgccaggaggggttacaatttcatccattacaccccgttgcaatcgcgtggatcgtccggcagtccttattcgatctatgaccagatgaccatcgaccaagccttgttgaagggaggcaaggacgaggacaaggacggcggggtcaagcaggttcaacacgccttgaaggtcgccaaggaacagtacggattgggtagtctgaccgacgtcgtcctgaaccataccgccaacaattcgccctggttgcaagaacatcccgagtctggtcagtaggcggtttcttgctcgagccaggcgcaaaagatgaacggtccgagctgatctgatcgatcatccgtgctttgcctaggtttctcccctgcaaactcgccccatctgactcccgcttgggagctcgacacggccatgatcgcattgtccggcgagctcgcctcgcgcgggttgcccaccaagctcgagtcccaaggtgatctcgaccggatcgccgaagccgtacagagcacgatcgagagtctcaagctgtggcaattctacgtgttcgacgtcgaggcggagaagaaagccgtcggatcggcttcgcccaagacctggtcgggcgaggatgtccagggcaagagcgacggtgacttggtagagatcgtcaagaggaacaatgtccttaccggctaccgatcgtacggtggcaggtatatcaccaaatccgaccctgccgtcgccgctggtctcgtcaaggccgctcgaccggatgccgatgcgtccgagacgtggggcaagattgccgatattctcaacgtcgacttgtacaacgaggccaacgacgacgccaaggcggccaaggccaacattatcgaccgactcaagtacacccgattggatgctcacggtccccgcttgggagagatctcggccgactcgcccttgatcgaaaattactttacccacgtccctcaatcgtccaagacgtcaaagttccccaaagaggccctctcgttggccaacaacggatggatctgggccgcggaccccttgagcaactttgccgagtaccccggcaaggcttacgttcgacgagaggtcatcgcatggggcgattgcgtcaagcttcgatacggcaagagcaaggaggataacccttggttgtgggaccacatcacctcgtactgtcaactgctcgccgagctctttgacgggttcaggttggacaactgtcactcgaccccgctcgccgtcggtgtccacatgatcgattccgctcgagccgtcaaccccaacctctacgtcatggccgaattgttcaccggtagccaagagatggacttgaagtttgtctctcaaatcggtatcaacagtcttgtacgagaggcctacaacggaagcagccccaaggatttgtccggactgtaagccacagacgtcttgattctactccccatccgttgacgttggctgatccaacaacccgtcgatagcctttacgaattcggtgtcggcaaggccatcggttcgatgagcggcgcttgtctctcgagcaaagaggaattcgtctcgcccgtcggcaagggcgccgtccgtcaagcgaccgtcaccccgcttaccggttccaagcctcacgcctttttctacgacgtcacgcatgacaacgagactcctgccgacaagaggaccgccgaagatgctcttcccaccggagcactcgtcacgttcacctcggccgcgatcggatcgaccaagggattcgacgacttgtatcccaagctgctcaacctcgtgtccgacagccgtaaatacgaagtcagcacggccgacaaggagaacggtatcggcaaagtcaagcgagtcctcaacagcttgcaccgcgagtttgccactggaggatacatcgaaggacacgttcaccaggagaatgacgtaagtctgacgcctgatctccgcgggtgttggtgtgcgcgattgacgaattcggctcatgtcctacagtatattgtcatgcaccgagtccacccgtcttcgcacaagggatacttgttggtggctcacactgccttcaataagggcgcctcgggccggggcgacagtgagtgcaagtgaatccgacggtgaccgccgatagcttattgttgcgctggcatttgcatctcgcttcgcaacagtcgcgcctttcaagcttagccgacaggacgtaaagttcctctgtggtgcttcgttgaagacccaccccgagcagttcaacgagagtgaccagaccttcaagagcatcccatcagagctggtcgagatcaccgaatgcgaggtccgagccggctccgacgaaaatggatcttatgcggaagtcgttgtgcccaaccagtttgagccaggctcgatcttgctgttcaagaccgagatgaaggtgggctgtgcctcttttccaatacctccgactcgctcttactgacgcctggtccattgcaggacgacatcaagagcgatctcgaccagaccattatcgaaggcgctgttgccgcctttgccgatctcaaccgagtcgagctgaacgtcgtcttgcaccgagctgatggcgaggagaaggatgccaccggtggagatggtgtctacgatattcctggtctgggcgccatgccgtactgtggtctcgaggggtggatgtcgcatctccgtcacatcatggagcacaacgatctcggccacccgctatgcgcacacttgcgccagggaccctgggcaatgcactacatcgtgaaccgtctcgagaagtgagtcggtttcagagtccatcagatcatgagtgactgctgacttacgctgcccgcaggcaaaccgacaccttccccggtcttgccaagcccgcaaagtggttgaaggagcgcttcgactttatcgagcgatcgattgctccctttctgcgacccaaatactttagcatggtcgtctcggaggcgtacaaggcggctcgtcaatcggtcatcgagcaatgctcggactttgtcgcttcgggaacttcattcacccacgacttggcgctctgtgccgtgcaaatgtacggtcaggtcaacaccgcttccatcgacccttcgaagcctgtcccatcgcttgctgccggtctgcctcacttttcggctggttgggctcgatgctggggccgagacgtcgtaagtaaccggagtttaatcactgtgtgagagcgccccaccgaccttttgccatcaacagttcatctcgctccgtggattgttcttgaccactggcgactttggagccgctcgagatcacatcttggcctttggttccactttgaagcacggtttgatccctaacctcctcgactcttgccgcaaccctcgatacaactgccgagatggtccttgtgagtttctactttgggagagtcagccgtcagaaggatcgcattgaacggatatttcgcgtcgtccatagggtggttctgccagaacattcaggattacaccaagatgtgcccgaacggcgagaccatcttgaaggacagcgtcaagcgaagattccctgccgacgactcttgggtcgcatgggacgacgccaaggcgtacgcctactctagcacggtcgccgagctcgtgcaagagatcctgcagcgtcatgccgagggtatcgagttccgcgaatacaacgctggacccaacttggacatggacatgaaggacgaagggttcgaccagaagatctgggtcgactggaagactggtatcatctttggaggcaacaggtacaactgtggtacttggcaagacaagatgggatcgtccgacaaggccggtaacaagggactgcccgccactccccgagacggtgcaccgatcgagattaccggattgttgaagagcaccctgacctgggtggacgatttggtgcaaaagggattgttccccttcaagggagttgacgtgaccagtgagtgacgccgtgcgtgttcgaggcgtggctggttcggtatctaagcgatctctcggctctcgcagttgatggcaagaagaagagcatcacctacaaagagtgggctgatctcctccaggccaactttgagaggtgttactgggttcccgagaacccggaagaggacgcctcgttcgacatcaaccctggcatggtcaaccgacgagggatctacaaggatgtctacggtactcccaaggacagggagtggtccgactaccaggtgagtctcgccgtggaaagcctggatcgacggacgaccattgaccccggatttgacctcgtagttccgatccaacttccccatcgccatgaacaacgcacccgagctcttcacgcccgagcgtgccatgatcgcgctcaagttggccgatcagcacttgaaggcgccattggggatgaggacgctcgacccggccgattccgcttaccgaggggattaccacaactcgaacgattcggacgatcaggccgtggccaagggttggaactatcaccagggtcctgcttggctctggccttcgggagactttgctctggcgtggttgcactttgatcagctcgccggagatggcaagcaggtcagtcagcgagcttgatggcggtgacggccgaggtcgcaaaaaaaaggcgacatttgctgatgatgaggacgtctcgcgttgcatcctataggacttccaattgaccctgcaccacatctctgaatggctcttgaaccaccgcaagtacatctcgaccgacaagtggcgaggtctgcccgagttgcaaaacgatcacggcgcttactgtggtgagtttggcatcgggtcgtaacgatagataccccctttgcgcgcgatctttactgaccctcgaatctcgttgatgcgctatagccgacagttgtgagactcaggcgtggagttcgagcaagatgctagatacgcttcattacatctacaccaagcagaacgagcaaaagcaataggttcctcgtggggtcgacgttgacgtcgcgtggacgcatgtagatgggcaggatcggtcgttggtgtttgtcctataataatcagtttgggttcctcttgatcttgttcttggtttatatcactgggggaaagctatagacatgtagcttgacgacgacgacgacgcgacgacgacgacgacgacgacgacgacaacgacgtgattatggtttttgtttcatgccggtcggtctggggcgactgtcactcggacacggaggcatgctgcgactttgtttctttgccccgcggacgagtgtgagttgttggattgatccgaaagccaagagatgccgctcaagcgcgagcgatgcggggggtttttggttccaagtgacatcactttacgttatcatcaaggctttgcccccgcttcgcccctccacctccttgcgcctcccttctcttcgggtaggggagttggggatgagggaggtaaagttcaaacggggggtgtctgtcgaagcgggggttgaatcgtcagcgtgttagcgagaccatatggtgttaaatcaggggggggggacgacggcttactggtccgggtttgagattggtgcagaggcagctttccatagttgtcagccgcgaggtcctgtacgacatccaggaaaacgaatgatcaacacgacgacagtttgacagggaaaggtgatggatgatacggacgttggcttcctcggcttccttcttggccttggcttcggcctcctttgcagctcgttcagcggccttggcagcttctactctcgagtgggatgaccatcagaacagaatagcatatagaacgggtcgattgagagtatcagagaaccgaatttccaaggggggacgtctttgtgaccctgaactgactctctgcttctttggctcgctttttcaactctcccttgctcaaaggctttccgtcttccccgaggacgacctctttgggctccttggccggggtatcggcgggtgcttgttgggcgttttgttcttcagccgacatgttgggtgtgggtgtggtctgtatgctggctattgagaggtagatgcgaggatcgtaacgagagttgaagtgcaggtgtgtgccaactttgaaagtgatggttatgggattagctagaagtgacgtcgttatcaattaaatgatgagcgtcgatataacctgtagtctagagccatcgaatgacgtgtcaatcaacacaatcacatgcttttccaataataattccccttctcaacccaacttgacctcggtcctttgttttcgattcatcaatcaaagtcttggggggagggacatggcatacatcctactaccacctttactactactaccatttacaaccaacattcctcaacatccaccaacgacccacgttcaaccccgacctggatcccgtccactctacctgtctgccccgcctgcctagccatgtttcctaaactcgcgacgaccgtcctctgcctatccagcgcgtggatccagctcacacaaggtcagcccagcccagtccacccctgagcccttgacttgacatcgcatcgtactgacatcccccccccggtgcgtcgctgtggtagctgtcaactattggccgatcgatacgccttcccgggaaaacccttgggtgcagggtcaaccgatgaatatcgtctggggtaccggagatgggacgggtgagttctcttcgcacgcccttgaacacgggtcgaggtcgccaatatctaatacgattgactcatccgttggatctctctctccccccccttgacattgatcgtctctgaccgacccgcacccggacccggacgcaggcgtatcgacgttcgacatccaactccacaaccccaacaaatccatcctaaacggcttcctccctctcgcgcaacgagtcccgctgaaacgcttcacctcgggttcccgtaaaggacaatggggtggagaactcgggatcgacctcggtttgttacagggcggggacttgcccacgggggatgggttcagtttgatctttatggataccgtcagtgggacggtttaccataagagtaagaagttcccgatttggccggcggcggaggctccttcgaattacaccacggcgagtgagttcgaacgttcagaacctgattcccgcgagagccccaaatcccgttcgggttcggctggatggtcgtcggaactgaattgtagctgacatgtaccccacccccgaccccgacccgcaggcctaccggatggacctccagcgacgacggcgacgatcaccgcggctccgaaccctactcaggcgtgggcgatcactttggacgggaccgtcgttggcggggcggtacgtactcgtcccgcactcttccttgccctttcccctccacacgcttgtctttgattttggctctgagctcgactctgattcggttgggggctgactcgcttgggggttgttttttcgtaggtcacctcgatcgcaggaggtccgggtggacgagcatgatcccccacggtactctttcgtaccctatcactcttttttccttttctttcacgacaacgcgttcagttcacacgcacatgtccattctctcctccctccccctcaaagaacgttatttattatagacgaccccacttcctctccccctccctcctgaacgtgtccctcctcctcggtgtgacgtgacgtggtgtgtgatgtgtgatgttttgtatttctataccacgaccatgacctctgtttggtgttgtttacttggagtggtcgatgccgtaatttcgcgttttcgagggcaaaacacagccggatcacagccaaactaccagctaccagctacgactagttggatggtcaatgactgcgaattgacacagctataacaacctccgtccatcccccatccacatccaggcaatccgcacagcttggtctgattgtccgttcacatcatcaacatcatcatcatcgtctatcgctgcgtcgacgatcaacggatcaacagagaaccaggtcgacctagtcttgaccgggagagcgcacgcgaggatcaataacaaatcattcaatcaccagataccagttcgaacacgactacgagccacgagttaccagcgatctccttccatacattccagggtcttgcatattctagactatagacggaatcaacggccacaggtggtcacctcccggaaagtctcagagcaaacgtacagcacgttgggaataccggggtagaagaaacccttgaaagcgggaacaagtaggatcgacaggaagatccgcaaaccgacaagccgataacgacgactaggacgaccaagacgaagacgaggacggggacgacaaagatggttttcgctccgaggtattgttgctgcggtgagtccacccaccccatccacccccgactctaggcgtacttccagctcgaagactgatccggaatgtgatactcggtggtaattgtcgtcgtcgtcgtcttcgtggtggtgatgaaatagcaatcccgctggtcaatgtagggatgtacgccctgatgacggaacaattcgtaagtcgtcctcgctccccacatccgaggtcgagctccatgacgacgaggtcggggtcggggtcgaaagaagggtgatcctggtgatggtgatggtgatgaggatgctaaaggctggtctattctttctgattctttgcgtcggtcgtggtcgtcgtataggtcgtctgcagtgtagcgggggtattggcgctggccactccgacgagtacgtccgactgcgttttcctcccatctcgtcgtcacgtcaaagtcatacttacttcactctatttcacttctcttttgctttcgtctcctcgatctcgatctcgatctcatcctcatcctcgatataccccgaatcgacagtcgtcggaagctacgtcccgagctatacgccctacatcctagccaccctgtgtttcgtcgtcgcggcgatccagctcgttgggtttttcgggatttaccgggtgaggccccgctcgtccttccccgggggagggcaggagggatgctgatggttcgacttttcatcttttatcgcgtaccccatcggttgtttcgataccatgggtttcggctgatttgccatctcgacgacgactacgacgacgacggatgtaggaacaagtccggactttccgcacgtacgcatgggtcaacgcgttcgcctttgcttccatatttgcctgtggagcagctttggtagccgtctctgctgcgaggcatgacgaggccgtcgctcgatgcatggtcagtcccggcgacccgctcggatgtcgagccactgtggtctcgtcgactgtgtactgattcggccctgcgttggacccccggggtagaccacgtacttcaaaggacaatcgaacgatggcacggtcaacgtctcttcagagggcaaaacgatctgttcggcatttgcctgggctgatgtcgggatcatgggaggtgcctggttgatcctcctcgtggggcaggtgtactttatcttgtaagtttgggtgtactgtgacttcggcgcaggggtcgagcatggactgaccggcgacgtcgatagtatgatcaaggtgtacgcctcggagcaaaaggaggatcaccagaattacaagtcgatctacgaggccaacgcggaagagtttgccatgatcgagaggaacagccagtacgtcccgattgtcgacaaactcggctcgcaccccgactgatcacttgggatttcggcaggtgggggcccaacccggacgcatgggacccgagggagagcatggacggcgacccaaatgccgtcccagggaacaacatgtacgaacaaccgtactcccgtccggcccacctcgcaggccacgagcgacaatactcggaatccagcctcaagcacgaattctcgcaagacgagcatcgggcgcacgattacgagtatgaacaggcgaggatggatgggcaagcggtcgggtatgatcatcaccagcaccagcaccagcaacagcactcgcagtaccagcagcagcaggagtatgagcagcagcaagagtacgggcagcagcaagggtatgcgcagcagcaaccgcattatcagcagggttacccggacgagccgcagcatcaggatcagggcgggtatcacgcggatggtcggagcggcgggtaccgcctgtagttcccctccttgcctatcctcgacgatagtccatgtccgtctgtcaaatgtacacaactgttcccttcgtttggatcgtcgctagcgatctttgtgtttaacgacctctttcgatgacgacgcgtcaaagatgaaatattctatacccgctcgtccgtcgaccccgaggtccagccaaaatggggtcggctgtgagaggatgtccagtcctgatctgtacttccgtacttgccggatgacttacaactggcaactagtagtatatttgtacgcaaatgcgacgcagccacgcgaccattcgattattcttccgtgcttgacgagaactgagaattccagacggatcgctttggcacatagcttgtggctcgtaggaatatgcagtatgccaagcggaccgggcccttcaaaatcatgaggatatgatcggcgctgcggtggtagcccgaagtatcgtttccatgttcacgacctactcgagcgtgacggggattcttcagcttggttcggacggccttgccctcactttgggcagcctcagagtcatcctgggaatgtttacgacttcattgatctttgcctgcgtctgtttgcctctgacaacgtctccttgtaatcgacagctgcttccctgaaaagctgcggtttcatgtgagcatttctgtcaatactcttacgcacagtcagctagttgggtgcactgcgacgaaatactacagccgagtctaggctaggatggatgcattctatcgacacgatctcctttaccaccatacgataatgtacacacggagagagggggagatggggaagcagaaatcgaaaattgaatatgaccacccgccctccactttgcacgtcatctccatacccaggttcatatttcgctaaaacccaccgacatctcacgtagccttggtcgtctcctccttgcttgccgtctctggcttgaccgccgcctcgacgggcacggtcaccgtctcccccgacgttcccgcgggtggtaccgcaggcgcgttggtcgtcgtcgatgtcgtcgctgccgcctcggtagtgggtttagtcaccctcgcatccagagcttgcaatgccagggccctatcgacatgagcgcgaacgtcagtataatccgcatcgacaagaaacaacaccgggaacgcatcgactgacctccttcgctctgcctctgctcgagtccctgcacccccggcgtttccaggaccgggcaacatggcataagcgcccgtctgaggtccatcccaggattgtacgagcttgaatttgacggccagcttgaagacgaggttgccgatgtatccggtgtaaggactgtaattgcacgtgtcattacaatcgccgggggtttcaggaccggtgttttccatcgttgtggtcgtcgacatcactcgggactcaccggacgggaggggggaaccaatagatgaaagcaaacgtctcgctcctatcccccctgatatcgctctcggcgtgtgcctggtagaaacgcaggtaccagaaagctgatcgacgtcgacgtccaggacgattcccaccccctagtcagtctacgctacgagctgaagggtgaggaccggtatgccggggcttaccaacgatgaacccgaattgaatcaagatccagggttggaacgagtggacgactgtgaggatgttggacaagaggagtacgatcccgggagtgtgctacatcgacatcggacagacggatcagcctgtgcctttgacccgttgtgtcccacccacaggcagggagagccccgcgtcgatgcgatgcgatgctcaccttgaccctcatcctgagtttaccgaacagctgtacctgatgttccgggatcagttgggtgtaggcgacgaggtagccggtgatgagtgccgtcgatcctcggataggttcgccctccctacgaggtcgtcaccggtgtcgtcgacgagggaggaatgcggaaagtgattcgatgaaattagatgagtcgagtcgagaagaagttgcaacgtatcgaaacaaatgaataagcccggacgcaaacccacccagcatgcagggggcgttggttccatcgatcgatgtcgttttcgtttcgggcctcggtcgtcgccgtagttgccaggttccggctatccctgaacgtcttacggtgtagagtaagtatggatgacgagtgatgctgatgctggacgtcgacgtgttgatcgatcgtgcacaaaaactcgttcaaagagtctgacctaggtgacctgacctaccttgttcgtgggctcggtgacctctttgacctctttgacctctttgacccgtcgtctcgctcgtgtaaccccccatacagacaaggattttgtcctccttgctccagtaatcaacaagtgccacccaagtctcggctgacatcagcaccatcagatatacttgaacgcaaccgtgttcagcttgtcgacctggttcaacgatcatcatccatcatcgtcaccatcaatcggcgatataaacccgttgtcccgcttgtgacggaagcccagcacgcgatctcactttcgacatattcaccgccgtcgacatcgcgtccacttagtggtatcatcgacctgtacccacgaaccgcccattgcagaggagaagcctgatatacaggaaacagccgtactgaggtcaactcgcggacaaaggtagctgcaaaatctcgacatcatcatcaccacatcgaccacgcaaccacccggactttctgatcacgcaatcagctacacgtcaacctacaacccctctaccgaaaatgtcattcctaccatctctcgactcgctcgtccagaagatgacatcgatcacatccaaatcccccaagacgtccactgacacaccggacgatgctacccggaccacccacgcgctcacccctgccgaggccggactggacgatgaccctgcatacgacccctctctgacatccccctcggccgtccaactgtccacatcattgacgcacacgagggagattagcatgatcgaaaagggtaccgaacacgtcggcgtcgtcttttcccccaaactcgccgagcaacggatcgcctggtgcttggacgtcctccggagggaaaacgtcaggagcgtgctcgacgtcgggtgtggagagggagcgttgttgcagattctgagcagaccagcgagtacgatcatggaggacccgatcgtccccgtcggatcatcttccactggaggtgcgatctcgccagggaccggacaagggagtagctcgtccagaccctcggctggggggttgaagaggttgcgctcagagacgtccgagtttgctatgaacgggagggacgcagcgagacggtcgtcgaggcatgaggattctccagaacctccggccgtatttaaagagcttttcatccacgtaagtcgaagtgcctcggacaacataataccggcgccctgatcatactgtccacgactacagcgtctcggtggtctggatgtcgatccgacgactatccccatcgctgtccgtaacaccgcgcctcccccttcgaccagtaacccgatgtcttcgtcacttgcctcggcgacaacgggtttggactcgtcgccctcatccatatcgtctccatccaatcacaacctcaacgccccgcacattccgccgagatggcagaggctcgaggtggaagtttggcagggtgggttagagaagcataatcagaggctggaagggtacgaagcgatcgtcgggatggagatgtgagtctacctttggcccttcatacagtatgtgacgcgtacgagatgctaatggttacgctttcatagcatcgaacatttgaatggtccatccttggctgtctttccccagatgatctttggcacgttcaggcccaagattgtcctcatcacgacgcccaactttgaggtaggtgccggcggctatcagccgatccgggactttcctcactgacctctctacgactccgactgtcagttcaacagcaagttccctcgatcacacacccctgacgggtgtcatggtccgtccaaggggttcttggatcctacggggaggaccgagagggtgttcaggcactcggatcacaagctcgagatgaccgagcaggaattcagggactggtgcgaatccgccgaaggtgagtcgctacacttcgcatgaggtaggtcgagggtcactgctgacgaacctaccaccactcagaatggggatacacggtagaaacgggtgggatcggattgtcgaaccaaccttcgtaccacgaggacgacccgactcgaccgatctatgctactcacacggccatcttccgtcataccggaggcgcgcctcatcgatccccccgttcggtccgttcggtcaggttgccctttatgccagccagcggagaggaatatcacgcccatcgtttggccgttcgccacgtccatgagccgagcggcgcgggacaaatgtacaggatggaatggaatccctcgcccgagtcggacgagcacatccgaggtatcgtccgggacgcgttgagacaatggaaagagggcgaagtcaccctagaggaaatctgggcgctcgattcggtctcttccgcttgcgtgggcagcaagcggacactcgtccgtgctctcggcggcctgggtaattgtcccggtgcgaccggccaggtcggtgatcagcccgagtgggagctcgtctggagtcgagtatcacccggagggatccgggtccgatggaaggactttgtcgacgaggaaaaggaggaaaagagacgacgtgaggattggggagtggaccgaacgacctcggcagcgaaagaggtcgtcatgacggacacgagcgggtggtgagacccgacatgcggcgactaggatacacgaagttgcgcaacgaagagaggaagagcccgccgaactcgatcataggagcagccgacagatcggtcccagccggacatcaaagcgtggattgattcaaatcgacatttttttagcatggatagtgcgatcgataatctattgtacacatttgtttcgtgttctcgcgaggaaccctacgcccactccctatgcccattaagctagtcccgcctggactcctgtccccgttcctctccgtccgcttctcccggtcactcatcggttgcgggtcttgccggtcccggcctttttcttgtcgtcgccaccaccgagggcggccttgaagagggcttccttgacccagttctgagccatgtcggcgagatcaccggtcccctcggtagccgactgcgccttggccttggccgccttggtcttccgggaggatgacgaggaagacgatcgcctgttcttgccgctctccttttgacccttttgccaagcgtcggccatctcgcctgcgaaccctcgggccatgttggcgaacccggcttgttgacccccaccgacggcgtttccgagggacgaaaagatgtcaccgagtccgtttccgttggcaggagcgttccctccggcgttcctcccgctcatggcgttggtgacccaggtgaacaggctgaaagcgagcgtgatgaggctcccgtatcggaacgccgtgctgaagaacctggtggccatgcgcagggtacccagaaaggtcctgaatgacaagaagatggcgagaccgctgacgatcaggggcacccagtcgcccatgctcttgctgcctgggtcggaaaagaggtcgccgatgttatccgtcagtgatctcaggtcgatcgtcctcaacagtccaaagacgttggaaagcgtctggacgaggatcccggggatctgagtgggttgattgtatgccatccatgcgagctgggccgggttggatagcaggttgatcaggggttgaaaggcctgcaagaactgttgggctggttggggcaaataaggcccgacaagggagaggagcatactgtagcgaagacgcgggcagattagcggtcgaacgttgtcgatgtgacgacaacggtcactcacttcataatggcaagcgatcaaactcggtgattactctgtttcaatactgggatgatgctaggccggtaaacggataggtacctgtttctagtaggcatagtcgattaatgtggttatgtactcgtggaactcttgcccaaaccaggactcgaacgcgaggaaatcgggtaaaaacaaaacaaaaacacgacgtcatcgtcgctcgtactcgatttcggttccgtcagcaaacgacatggaacgatcgactcgccacaactgggctggggaggggtctcgatgcatgtcatggggtcatgagaaattctatatgggtacggatcatgttcgtccaaagaggtaaagaagaagcgaaaaaaaagggttcgaggtcgaaagcctgtgctcgccggtactgaagagataggggtagggaagcagagacgatatgatatatagatacgacgcggagggaggctccagccgccggtgaccgttcctatgccctcatcggtgcgggggcatccatgtatcctgggtgtgttcagagcaaagcggaagagaacgtcctactccttgattatcctgcaacttggtcatctcggtcgaaaagtctgtcaggacgagacgctcggctctatttcttctgtccacccgtcttgaacaagacgagaccggcgagggcgaccgagtaaccaaagacctggatggcagtgatggtcgatccaaaggcgagcacggaacccgagatgaggagctgagaggggcggaggccggatcgtctgtcagtcacgatcgcacgtctcgtcatgagggggctgcgacccctgccgaatggtgactcacgatatccttgagcacgccggccaaggtcaagaccagaccggatccaacggcgatgaggaagacggcggcgacgttcaaagcgaacgcgatcccggcgttggtgaagaggacaaaagcgccgacgcgttcgaggtggtagaacggctcgaaaccctcgacgaggatcatgatggtaaagttgatggcggcgcagacgggcgcgtagtagtagagcgagaccaaggggtccatctgcgtgaacacgagcgcgaatcaaggtcagtaacgtcctcttttgcatgaaagacgtgactgcagaggctcaccttcatgccgtgcaagagaatctcgatcatgaccaatcgcgaggcctcgaaacagagggccaaacattggcagacgaaaccgaccatctcaaagtgcaattcgccgtaagcggctggagagaaagaatgatcgaaacgaaaatcagtcgttgcgacgggggcggaaagaggcgcaggaactcaccggtgcagcatccaaacgagatcatctgggattatacagccagatcccctccttttcagtcagcacgatgtccctcgtcgtgtcacgtgtcgagcctcgagggatggactcacggcgacgactccgatcaacctctggttgggctcttgcagcctaaaggcgaacgagatcaagaggatcacgacggggttgaaggccttgagcatttggataaaggacacgctcaggctgtttaaaccggatttcgagagacgtgagcgaggcgagtcagccgatgttcactttaaatgtcggcggagggcacttacgtgaggtaggcatagttggagaggatcagactgccggaaaagagcactccgatgggcaagatcgacttcatccatttctccctctgttccgtatcgcgggtcggcgagaaaagaagcaatggaaaccaccgaagatgtcaatttcgacgttcgatctggtttgctctaggttgcgattcgctttggtgtactgacgggcatgtcgatatccttgacgctgtccagcaacgtggtcgtccgttgcaacaccctcgttccgatagcctatatgcgcgcggacgagggattcccccggtttcgaatcagctcggatcgtccaggtggtgcctagcgggtgaggaaagagaaatcactcaccgaaaagatcaagtgccactatcccatcccatcccgcccggatcaagtccacatagaagacgatcagcctccccgccttttttcatgaacaaacccaagacttctcgctcccagccaaaaactcacggtggtcaagaagatggggtacttgaagttgagctcggagaagacgtacttgttgtacaggatgaccgagaccgagcatgcctgaccaggtcgacgtgggttagcgaattcggacgatcgacgttccccccggaataaagcggggagacggttgggggaaggggggacttaccatccagatgggaatgactgtgattattcgagagacgcaacgcaacgcagcatgacggatcgtacgatttcagatgcgatgtcgatttccgggattcgacattggcccggaacgtttgtttcagaggacgaaggcgaagacgacaagcaaccgaacggaggacgaagagagacggagagaacgagagaaggtaccggaaccgaatcagctctcacgcttccaccggctcccaagacggatgactcgatttcgaccgtcgacagtcgactgtcgacatcgagattcatgcaagaaagggcgtagggggggggaggggaggactcactcagccatgcggggatgttgatcttcttggcctgagccggggtggagaacgtgcgggaaggttctagcctgggagcggggtgtgtgtcgatttcccatcatcgcaggcacgagcaggaaatgcggcaagtgcaggtgcaggtgcaggtgcaggttcaagtgaaaaatggaacagcgaaacaacagatgtgtataagagacagggggtgtagggggtttgaggatgcttattatcattggatttctgattcttcgacgggatatacgagttgggatttcccctgcaatgaagccgccgctgttgttgtcacaatgaaaggtcgcctcgaatcgatagctgatcgtcatctcggtctttattgccgtcagaatcacgacgacctcgctcactcgacagacatggaggaaaccaagctacgagtcttgacgctcaacgtctggggactcaaattcatctcccccgaccgaccggcgaggattcaagggatcattgaccacgttcgacagcccatcgacgccgacgtcggaatcgatcgcaagagctcgatcgcatacgacgtcgtctgcctgcaagaactctggatctacagcgattacgaacgggtcagggacgggctcgaaaaggtcttgcccgagtccaaattcttcagaaggtacgtccgggttcggtctgacgtgtcgcgatttcgaatgcggagaggccgggttccccgaatgaaccgagtgtcgagagatggatgtaaaacccgctactcgcaagcggacggagcgagtctccatgtcatgtcattgctcaatatccataaattccagtcgtccctgctctctcctcgctcgtcatagcccgcttccgcgaaccgagacgacgaggctgaaccccttggtcccttgcttcgccccccaccgcttgcgtctcgtttcagtggagcgctcgggtccggtctcgccatcttttctcgtttcccgatcatctcgacccataccctgccttatgccctgtccggcttgcccctgcacgtgattgccggcgatttcttcgtcaacaaggcagcagggagttgcgtgctcttgcaccccgaactgggagaagtagaggtctggagtacccacgtgagcgcgcattcaccccagtacgaggcgtcagtcgagtttggtggaattgacacgtacggccttggcctagatgcatgctgcgagtgaaggatcagagatcgttcaggctcatcggatggcccaggcgtggcaattggcggaccatatcagggcgtcggccgagcgaggtagatatgtcattgccgtatgtcgcctcccgcccgctcaattccagctagtgcttatcacgactcggaactctggtttcaggccggagactacaactcgtcgccctggtcgctgcccatctccatcctaaaagactacggatgcatgctggacagctgggtcgagtcacacccggcatccagcctcaaatccgatacccccgagtcggccgaagacgccatcgagtcgttcgggatgacatgcgattcgcccatcaactcgtactcggcggggaaacccttgtcggatacggccaagcagtggaagggcaagcggctcgactatatcttctatcggggtcctgatatcgccaggcggagaccgttgcagtggaaattcaaacgggacaacgggcatgatcaagcacacgagggtggagacggggacgtactgcagcaaggagaacccatctcgagctcgatgaacaaggctcccatcttgacgtgcgaatcgagtcgggtcgtcttgaccggcctggtaccgggacaaaagttttcatactcggatcatttcggtttgtgctcgacttttaccgtcgtacccgccgattcgaaacgtaatcccgcgatcgaatcggacgtcctgcagaaccgtcccctaccggcaggtaacagcaacgacacgtcgacctcggaacccctcgtcaccctagacctcgacaaggccgaagcggcttacaactggtcgtcacccgtcaccaccccacgtgcctttcacgtcccgacgaccaagaatcaaactatcaattcggctttgcaaacgttgcgagcgtacacggcactcgcacgtaaagacgccaggtttcacctccgcgtcttcggcacgtcgatcgcgttcgcggtggcgttgacgatatcttccgcctggcaacccaaatcatggattcaaccggtttggacgctgctgggcgtcgctgcgggagcgctgggcgcgaccatgctgtatgtggggttcgtttggggcgagtgggaacagaatctcttgttggaggtgacagagcagatggagctcgagcttcgggtctcggaattggaagaaaagggcgggtcgccttgatagtggaatgctagacagttgtattcggctggaaaaagtcaagttgtagcgtagcgccatgccgcggatccatttatcgatcgtctcggctggaatcccgtaaaccgtccttggcagcgtggatcccattctccagatcgtcttgaacactggacgttggatttcgattttgatcttgctgatggtcactcggctcccgactgcgccatccgtctgaatgatcttgcagttttgtaacggtaagccaatccgtatcttgacgattctctcgctggtctgatttggcatttagttggatagtgttctgtgaggcgatcaattcgatgcgtacggactgttgacatcacccctgaccggcaatcggatcgagttctattccggccagaacaacctttgccacgcttcgacccatagcatcggacaagaactgctcgatccagagtacgaaacgttgtctcgaaaggcggcactactgaggaccgccctggcgtatgtacaaattcgagaacttgcgcggtcggtaagggcttgcggagaatgaataggacgttcagcgagctgcaagtgctgatcgcaagggcgaaggatcggagtctagccgtaaatggcgtctgacggcgataatgcgcgagcattacagtgacgggccgatggcgctgcgtgctgtcgtgaaaagggacccgtgtgaggtccagagagcaccaaccagcagaagaaattgcaaccagtgcactgttgacgtaggactcaatcagattcttacagatcttgtctttggcctctacaagttgcgccaattgcaagctttggtcaagactttgagtgaacatggggaagatgaatctgaaggtgttgaacctagagatgtcatgctgtttggttgtgttacgacgcatggcaattatatattgcctggcagagcaacacttttgcttgcggaggttcttcacgaggctagatctgagcagcgtagagcggccggccggagatgagtatcgaatcaaatggcgtcgtccggatcgtctcaatctcgtttgagagaccgatgctgccacaaccagcctggaagaacccggttcaaggcattctcgtgctagagaccgcaggatgcgttgaaagtgcgcttgacgtcgtggaaagtgagtgatgtttggcaagatgttcagtgtatcgttgcgagcccggacttgaaacggggacatcttctcggtgcagattttccgtctgatattgatagaggcggcaatgatctcagtgtcatcagacaccacctttgtgctgcactgcgccatcaagtcgagtggtaaatcgtcgttggcacaacatgcatcggaatgcggtgcagtgattctggggacccgagctttgcctagatcgacacgctcgccaccgctcatatcgccaagtcgcgcaacagagtggcccttctcagctgtcgctcggatgaaacgccgccggccgtcaagcgacgcttcggcctttttgctgtgtaacttcgacgtgggaacaaccgcagtgacaccaattacaactcccgggtggcaccgtcgtcattgctgatcaagtggaaccccgcccgaagcgctcaggtcgttttgaacacgccaacgccacgccacgcgcgataggaatatctttcgggtcgtcaaacggacaagataggaaattatttacaagcttttaagccacaagcagaaagggaggagggagagagaccgaggagagagagagggaaaacggtgtgaaataaatggatggacggggccggggagtatcggtacgctccgaccgggtctggttgatagaaaaacaagatgatgactggatgggaatatcacttggcggtaagatttcggattctatgggtaggcggttgtattcaggcgggtgacggacgacatgttgagaactatcacgcaggacggacgaatactgcgtcagtcccccccgtggcgtggaccgcgaagacgccaaaacgcaacgacgactcacctcttcccccacgcgtgacgtcaggttcgcgacgctccggctcttacagggcgtccatgttggacatgacgttcatgacggtagcgacgacttcgaaacagaggtcctcgccatcctctcctgctcccggttgcatctcctttctgacctctctgacgagctctgcgacgctctcccttccctgtcctcctgacccaccggcgagcgaggtcaagatgccgtcctttttgctaggtcccccgccgatattcacggggccggacgagctggacgtgccggcgccgaacggccactgggagaattcggcgaggatatcgtcgcatctagcgaacgctgcctctcgagcgtcgtaattcaacctctggagggcgttttcgagcacgttggcggcgtaggctgccgagacgagggcgacggcgcgcatgaccctgtactggacctgttccttgtgcaacgctgcgggtgggatcgccgtcgtcctcgcggtcaacagggccagggttcgtcggaggacgtcttccttggcgttcaggtcggcgatcggatgggtggccatgtcgaacagcaaaaagttgcgcttctcggtacggagcacgcccttgtcgacgagacccttggcgagacgttcccggacctgtttgagctggtacccgattttcatgacgttccaggtttctcctgcgagcgcgagcgagcgagcgagcgagcgacgtcagtgtcgagccctgtgacgaggacctggtgtcgccggattccgggactcaccactcatcagatcgatccacgctcccgtcccatacttttcgctcgtcttcatcatcttcaacgcctcgtccaagatggtctcacccgtctgtctatcatcgatgacctcgatcagcctgtcggggaggggcaaccgtttacgcgaggggtctttgacgacggctattcgtcgtcggagtgcgagttcgaggatgatgcagccacggagggcgtacgagatgttgtcgttccagaaagacaggtagccctgcgagcgtccccggtgatggtcagcctccgtacatcgacgtcgacgtcacaccgcgacgacgaccacgcggcgggacccacctgtttatccttcaatccgagcaagaggacttcttccatgaccgtcaaccgcggcatcctctccctctcccctcccatcgacccgttctcgtaatcccgggggtcgaaagcgatcttactccgaccttccactccacccgaggaagatcctccctgcccccccgccgaagtcgtcgaggatgacgaggcggcacctccaataccacctccaacaccaccaccaccaccaccaccggagagactcccacggggagtcccaccaacgccgtgcatcgtcgaggaagatccgagttgaggggtcgcagggagggaagatccggtaggcggggtcgtactcccggacgaggtcgggtgggcgcctcgacggcgggtgagtccttcagacatggtcgagggcgagggcgagagcggggtcggagtcgtcgttgaggtcgaggtcgagcttgaagtcgattgagatgagagaaaggaaggacggcctgtctatccgtctataatcgtcttgatggttcgaacgggctagggtccccggagtcttttcccccccgtagtactagtactactactgcttgtttccctttctacgtctaggtcagggtaggtcgaagagcaggtgtgattgcgatttcgtcgtcgtgaacgttccggtctattcggcagggggttggttggggggttacgatgtggacacagtgcagtgatgggcagggtgcgagtgagtagatagatacgagtcccgagtcccgaggtcgaggtggtcgaggtgacccgcgggtaaagggccaaggagcaaggaggagcggggcgcgtcacagccagctcagcacacaacacacggcacacacacacacacacacacacacacaggcacaacaccgcaggcaggcaacaaggtatggaggacaataacgatatcactgatgtagcgtgccaattgactgactgaggacgatacgatatggatggatatgtgagattcattgacacgacatgacatgacaagagagacgggagagagagatcaacccgggatgagcgggggagcgagggtcgaggttgattgggcactcggactctcgtcatcgcccccgggggtcggccggatccgaagcaaaggtcgagaggttgcatggatagatgaatggatggatacgtaagcacaaagggagagagtgaacgaatgttcaatacacgtcatgagcacgatgcccgcgtcgttatcaaagatgagctcggagtgattctttggaatttgcaatcatctcgacccgcccaactcgcgcttatcgatcgaagttcggctcgacgcgccgtgtctcgcgcttttactattcgccagatcagtccggatcctcctcctcgtcgtcgtcgtctgaatggtgggtgggtgccgctcgacatcgcttgatcgacattcccccctcccatatcaattcgatagcacttactgatacacaccagctcagtcttcgtgttactactcatctcccaagtaacaatgcaatgtctgctaggttacccctgttgttgatacgttgttgtgttgactagataacctcgatcacaaagtcacgtgtttatgcgttttcgtctttccacttgcaccttggctcactttcatgaaatcgtcatctcttctctctctttctctttcctggaaaagccaacatgccagtcaataatgtctaacccctaaccctctacctgaagcacaaacacccccttggaacgtctaccgaaaaaacacaccactactgcacacacacacactcccggacaaaaaatgcccgtactcccttaccctgaattgtacaaggacgcgccgttcgtcgtcttgtcagattgggtcagtactcgaggtcccgccaggtcgaggagaggtactcgttatattgatacagggaatgaattcattgcacaacacgatacaatgcattcctacctccgtccgtctcgatatctatcacgaccgggttgatctcggacctccaacacatcgacctccatatcgttctcttttctactgtgtgggacaacgtataacgcaccaactcgggattcgatcctctggtgctcgactggcgttcggatgaatgtccatcgatgataccgcacccaccacccacgcccctgaatgtccctggtcgtccacgacgatcatatgtcgcacgtcgacgttacatacgacgtaccgcccggctctcgcggatcggctttgctaatctctggcggtacgatcctgccgaacccgaacgtcgacgcttctgtcacactgcgacgcctgatgaccgcccatgtaccgggtcctctctgctcgtcccgactcgcgacattcgcatcgaatcgcaccgcatcggccacgctgctggctgtcgatctcgtcgatctcgtcgatcacctgcactcgacacttttcctcgtccgcctctgatccatgcggctttcgtgcgaccgatctcttgctgcatttgatgacgagtaggacggcacgatcacgaccaaggacagcaatgattgtgagtcttcatctctcgcccctcccgccctccatgaccattatcgctccaggcctatagtcgtcggcaaacataccgctgacttgaaacacgactcgtcacttgccgatcaaccctctgcgcgtgtgtgttcgagcagtcttgacggataacctcggtgagctttctcgcttgatcaggcggggctcgttccacgctccagggtcgtcttgcgcgagctgccttgccagcgacgcaccgcttggtcgcaaagaggtgggcgggagagtgacgctcggcttcacgtgcaacccacgtcgactgttgagacggtggcggccgggagcgagatccgggggtgtgaccgtcagatatctttcgacccgggagatgttgggggtcctggtcgtcacctgcgggtctgttgccggaccgatcactggaaggcagacggaacgagatggagatcataaaaagctcacaccatcctcgtctttccttttcctcgctcgttcgggtcgatgatcacccgggtcgttttcttccacttcgtccacccggggaacgtacctatcggacgaccccgtgcgctctcgtcgcccggctcccggtatcctcatcttgcgacatgtgacatctcaggaatgggttacgagaaacggtcagtcccgtcatgctgccttcaatgctcgtcactgatgacaatattgccctgcgtctcctgcttcatttacaaaacgtcatgcgcgatcgtcactttcgatcaccttcccacatgacctttgcgaaatcaacgccgtgatgatgatcacagacgagagatgaacaaggacgtgttgagcggcaagacgacgttcaggttagtgtgttgcgacatttcccccctgtttgagctcgatcgtggacatacaccgcgccgataatttggcatgagagatgccccggagggcggcagggcggaatggacccagacgattgagcacgtctgttaccaccgtacaatccaagacgcggtcccagctaccgcattggaaattggcatacgtatcgtgcacgactcggacctggcgctgacgctcgatctgttcccatcgcctctccttgaccgcgacactcttctcggactcgccttatagggattcgttcgccgagatgctccagagcgtggtcgccaacggtcacagtttcaccgagtgtcaagagattctacgacagagcgagtttcggctggggagtgtcgatcgtggtcaacgcaggctaagctttgatcgcgtccgcggtagacatcgtcctcgaccccggtttcaagacctttttcaggtggtgccgtgagaacggtgtgcccgtcatcatcgtctcgtcgtgagtctcgccaaagtcgccccgcgagtgtttgttcaccccgtcgctgaacgggttgtcaattccctcacccggcctcgtaatcagcggtatggcacctattatccgtgcggtactgaccaacctgatctcggccgaggaagcctcgtcgatcaatatcattgccaacgacgtcgaatttaccgacgagaacaaggagggcaagacatgggagatcgtctaccgacaccccgagaggtgcgtcgcgacggtcgtccccccctgttcgcgcgtttcatgtgttgacttctcgagtttggggatatgggtcgatgtcgacacgaacgcagtggatacgggcatgacaagtccaaggcgatcttgccttaccgggatttgccttcgaaaccgaccttgttcttttgcggggacggcgtgtccggtgagtcgaacgacgacgactcggctcgtgatgaaccggtcggactgaccattataccctttatactcgaaacgtggtttggcaacaacggcgtagacatgtcggcggcggctcatgcagacttgttgttcgtcaaggagatggcgaatggggattccgacctggccacgtattgtgagtcaccgtggcgggtctgcgctttagaccttgtctacgcgaaattaccgacggtcgggccatcgagactgatcgcccggtttctgtgtgtgatttcgacggacggtgtacataggcaaggagcaggatatcccccatgtgtctttccgggacttgtaagtctgcgctccacgccgtgtggtcggagtgctccacgtgctaaaaccccgcttcccccgaacattccacacatagcaacaaggtcctcgaggtcgtccagaccgtcgtcaagggtgaaaccaccgtctcttccgtcttgtcgtccgagatgcaggccgagagggtggcagacgtgcaacaagccaacgtcgaggttcaggagactcgggattgaacggggatggcggggtgagacggggatggatggagggcgtttggttaggggggaaaaaagggggtaggtagttcgggatagactgtgttcatagagagaaggaggttgtgtgtgtgcgtgaatgacatggatcgatagcagtcatgtgtgatcgtccgttgtcgttgcatatgctcaatatgtgtttgtttctatttttcgctcgttttgactttgactgcgcgtcatcgaagtcaattaggcgggcacaagagcactgaccgacccttgatcacttggatgacatctgggtaagttcaagagactctcttctactaccccgttataccacaacgaccagctagtctgactctagaaagtcaatcgtccaccctgtaatcaccaccatgtcggtccctacgtcgacctactcgctctcgcacgccgtctcgtcattcaccccggcctattcgacgacgacatcgaagaccacctcttcctcgggctcgaaaccggaatacgatatcctcatctacggatcgacctcgttcactgggaaactcgtcatcgactatctcgtacaacaccctcaattctccaagttctcttacgctctcggtggacgaacccggacgaaactcgatgcgctcgctagcaaggtcgaggcggatgggtatgacaagcccgacgtcgtatgtttccaactcgtcgatggggaacagggtgaacaggacgtgcacgaggccgtgagcaagtgcaaggtcgtggtcaacctggctggaccgttttcttctcaaaacgcagagatgttgatcaggtgagagaggtcacgatccgtatacaccgcgggactggaacccctcgagaactgctacacacttcggtgtacttcgctgaccatgtccccctgctcatcccgacgactagacaatgcgcaaaacaaggcagacactacgtcgacctgaccgtgagcctccgattctgctcctgtcgacatctcccctttgtgacctacgctgacctatcctccacgctctcgttcgccgtgatatgcttcggatccgcatcgatagggagaaacgccctgggtgaaggagatgatcgaaaagtgagccttccccgtagtcttatcccggtccatggtcttaaattccaaatctgacggtcatgctcgatgaactctggttgctacactctgcaggtacgactttctagcttcttcgacggggagctgtattatcccttgttgcgggtacgattcgatccctaggtgagccaccgcgagcgttcaccgttgtccgtctttccttgttaagagagcccaggctgactcctcatcgagacacggctcgatagcgatctgacgacctacctctcggctcaacacctcgcccgttcagggacatcccctgcatccccttcagattcgcagggagatgccaggatgatcagttccgagacgttccattggatgcgcggaggcgtgtcgggcgggacggtcggttccgggttcgtcatggccgagatggacaagtcgaggttgaagcgaggcggaggagagtttgctctttgcatgcgtgagtacttttcgcagcggtcgtcaggtcggctcttcgtgcttgatcacggtacgaccccaaggaatgctgaatcgggtgtgacgatcgggcgtatcaggggaagaagggaaaccatccaagggtctccgaccggcgtactacaacgccttgagcgggctgcgtggcatgttcttcgtcatggcgccttgcaacgtctcgatcgtccgtcgatcgtggtccattctccaacgagcgcctttgttggtgtcggccaccacctcgacccgcgaccccacctcgggctcgagctcgaccgtcatagccgcccgttacggacgagatttcacgtacgacgagtccatgtgtctcggttcgcggggtaggggaatgtcgacctggtcgagctggttctttggactggtcttgacggcgttcggagcggcgtttgcgaccagctcgatcgtcaggtcgttggtcaagctcgtcgcgcccgtgtccggtagtggacctagcgaagagtaagttcgagctcgtcgttgaaagagtttcatacgtctcgttgatgttcgtggctgacgaaattcggtacggccaaccaggcaacaaaagaagggctactttgaggctgtgaatgtggcgcagagcgagacggacgcagtcgtcacgaccatgtttgggaggtacgatccaggttacagcgggactgcacgtaagtacaagcatgcgctttcgtgagaaaccgcgcctactgactttagccctactcttcgtgatccttaggcatgctcgccgaatccgctctgagtttatccatcgcacacgattcgatctcgtccatcggcaagatcggcggtgttctcaccccatccaccgcgatgggggatatccttaccgaacggttgagacggtacggcaagtttgagatctcgactcagagtttcgaggattggaagcgaatcggggcggataagaagaacgtctaaggtgacggcggatcagttcgggcagggcaaatgcaaggattcgcttcgaaagccgatccgatggacatgagaaatgacatcgattcaacaaatgaatgtagcataatgataagagagtataccagatcgatttgtcctacagtccgcccggtttcgatcaaaggcagacgtcgcgacatgatccggaaatcaggccggcagaggtcgtacatcatttgttcgttggtgagccctgcgaacaagacgtggagcatttcccctccggccgtgacatcagacccagtcacctctcgatcggtccatctgggtatctccaagatccccaggcgcgtctggcacgatggcggggtgggtcggggcgctttcgtcgaggtcctaacgaatttcctcagtctccgctacagggcgttccctgtatctctgtccggcaaccctgcccacggctcgaaatgaggccgacgatagacgctggatgcgttatatcgatatcacaatatcgcaagcaggtctgcaggagaatcccatggcgctgctggacctgtcttccgctgagacaagggcgggggcgggggcgggggggggggggggggggacagggttgtgccagcgaataacgaagcgcgagcgacccgcgggacagttcgggccagccagctccctgcccctgccctgtgccccctgtgcccgttttttctcaattctcctattttcgctttctcacgcgtcgatcgatcccacccccaagcgtccatggggggggggcagacgggaatcaagccatcaatcacacttcatcatcaaacaacaacgacgacggcacccgagtctagacaatataaaaggtaaaaggggtcgcacggtcgcgcagtagagcttcaagtccaggttgcatggcatacccaaaggatgatcccgtatctgacgtattcatgagattttgttctttactttttcgtgtgtcgggatcgttttggtcgccctcaggtccattaacggctagcgtcgtcgcgagctcggttctctcgatcgatcgcccaccatcatctgaaacagacgcatcatcgtgccatgttccacacagaaactcgatcatacatctcctctccaaccgcacgagaccagcgcccagatgcaccataaatcatgggcctacgcaggaccacgttgtactcgagaaaagaccgtatgatatcgcccaaacgagaaaaagaaatctacacccggcccagaacgttacatcattcctccctctccctctccgccgcgcccgcgtccacgtccacggcgcagcgcctggtggctagtcatgccccagtcttgatcgactcgacgcagagaccctgcctcgcgacccgtctagaagtacttcatctcgtcctgagtcctgtaagggagtaaaaaaaatatgacaacgacgatcagccactctggtgtgcgcgcgtctccggtcgcatgacccgccaaactgaccttccacggaggaacgccggctcggttcccttgtagtagacgtcctcccagaacttgtcgagaccgggaggcttgctctccttggcctcggtgacggcctgctcgacctcggccttggcggccttgtcaatgttcttcaactccttgtcgtcgaggacgccccactcgctcaggtaagtcctgatcccgttgatggcgtcctgggtggacctcatcctctggatctcttctcgggttcggtaggtggtaccagggtcagacatcgagtgaccaccgtatcggtaggtgacaaactcgaggaccaagggtcccttgcccgaagtggtccactccttggcaaacttgcacgcctggtggacggaaagaacgtccataccgttggcctgaggggacgcacagagggaagcattgtcgatcagccgtcattcgatcctcgacatgaccccgcacgctgactcacctggataccggggatctggtctcctcgggtgaagaactgggtgttctgggacgacctctcggctgaggtacccataccgtacttgttgttctcacagacaaacacgcagggcaagttccacagcttggccatgttgtaagcctcgaacacctgaccctggttggaagctccgtctccgtacatggcaaaggtgacggtgctgttgcccaagtacttttgggcaaaggcgataccggctccgacgggaacctgggcaccgacgataccgttacctccaaagaacgaaggggtaaagatgtgcatcgatcctccctttcccttggacattccatcctcacgtcccaaaagctcggcgatcactcccttgacggtacctccacggaggacggcaaaggggtggcatcggtacgaagtgatgattcggtcgtcggcgttgatggcgctctccataccgacagcgacggcttcctatcgatacgtcgaggtgtcatcgcgttctcgtgatcagctacgaggcatctctttttcgtggcgtggcgacgaccgactcacctgaccgatggccaagtggcagaaacccctgatcatcttggccttgtacaacgcatcacaagcctgctccatacgcctcatcaaggtctgggatggatcagcagcatgtgaatcagtttctagaccctcaggcggctagcctcgagtcgtccgtcggagcgtaccatctgcgagtagagctcgatcatcttgtccttggtggtggtgacctcgagcgaaggagggtcacatcggtaagagtggaaggtgtcgttggaaagcttgacggtgaactgtcaagagcggcgacgccggtcgagggtgtttgagcaacgatcaggaaattcgttcgcctttcgagatcgagatcactcacgggctcggagcctccctcgggaagctcgccgaccaaagacgaggcggcagctgaagtctccaagaatcgagcctgaacaccggcgaccttgagcgaggactgccgagtcgtaaaagcggtggtcagctcgagtcgtcgcagagtcgatcaatgtcgatcgttgggtgccaccactcacagccctgagagctcgagcgccagcaggacgcaaagcagccctgaaagacattttgtgtagagtttgtagggtgggttttggggggttgagattagagtagagagggagatgggggttgagaggactaggaagatggaacctttgaccttgatcgatttcgtgctcgataggctcgctaggtgccggggtggggggctgctagctgctagacgatgttttgcttggggaatgggccaacacacggatgggatgggatgggatgggatgggatggaacttgccgcaccagacgcgcgcgggacggataaacgagaaagcaagggggagggggggacacggactggggaggcgaagagtccatggtcagatggactgggagcggacagaggggtatggttgatgtcgatatttcaggaacagatatcgaccccgaccccgattacgccgatgaagctcgaggggactggtcgcagcatttggatgatgttatgaggttgtaaaattgatttgatacagatcgggcgagattcgcaacatgacaagcgaggtcaagcgcgagatagcaacacacggtgatatatgacaaacgactcgatcatttcctgcaagagcccagaaatgcatagacgtcagtgcggttcgaccagtctcgggacctctacgccgactcgcctgtaaaactgtcgcttaaagttgaaatacagctgcaaaacgccccgatcaaacgaagaacggaaaccactagcaacggtccgtcacgttcggtcgtgtcagcacagcccgtcgtcgtctcctcgagccgatatgatcagcctcggtcccgactcaccgtttatgactgtactcccattccttgtcgacgatacggaaagcgatatcctcgtagggaggtccggcggtaaagacgagcaagcaggtatcgggatcgctcttgtcccggacgaaacgatatgaaggggtctgcgtcttgtcgctgtgaaatcagcgggagcgtgggacgagactgtcagcgttcgtttcgctctaggctagctttcaaagggaaagagacttgcatgagatcggggtaaaagatgttgaacttgtaaccctggacgacctttgggggcggattgtccgagctgtcagggaaaagcaaaggcgatattgatgagcgtcacgacaaggacgaggacgtctgaccggggactcactcgtaatgcgtctgattgtacttgttccactcgaacccggtgtgaacccggttgaagaacctcggcttcctcgccctgaacttgtcctcccacgtataggtccccgggttgaacaacccctcctcgaggttgaaaaactcttcgtcctcgtccaagtttttggcggcttcctccctgtacaatcgttcggccgcgagatcggcaaacgagggcgcgttgacggtctcttgcacctgagtgacgcgctgagttcgagggataaacgtcgtcgatgtgaccaaccgacgagcggcaaagagggcacgcaggctctcgtcctcgtccacgatgggcaacgtcctgtcgtcccgggacagcgtgttgccgtccaagagctcgggcgacatttccctgtcgtacggctcgacctgttcgtcggcacccgtctcgtcgacatcgtccccgagatccatctcctcggcagccaattcggcggcctgtctcgcggccgctgccggatcgagcgggtctccaccggccatcttgcctccgagctcttcctgtaccttgagcgcctgttcccgttgacgttggcgcagctgttcgagtcggttctgcatgacgaccaggtggatctgatgcagcttggactgtagcgattgcgagcaggcagcacgagtttggggtcaacggtttgtaaccctgttgtgcttatgttcctgatgggacccaaacgtaccttggccttccacacctcgaggcttctcaacaatccctcccagtaatccacgtcgatgggttccttgctcgcccttgccaatttcatcctcacgctctgttcgagtgccaacaattgctcgtgagatttcccctcgagcaatcgggcgatatccgtctcgacggcgacgttggtcgatcgaccttgggcggcgttgagggtgggatcgcgttcgaggtgtttctgacggatccgatcgcggcagatcttttccatgcactgagacgggatcgaacgttcagacgaggtcggtcagtacgtcgtacgaccgactgggggggagcggaacgacgagcgcgacgcggggacgtacctcccagaactcgatattgacgggagccttttccaatgacaagtacatcttgatgtcccccgacaactcttccatgtcctcgagcgtgaggttgtcaaagatcaaccaaggctcgtcgatatcccactccaacccggcatcctcccaaccccagacgtcctcttcccccggccctgtcaatcctgcccgtgcacccccgtcacctccgttggtagggtcggcgaaccgcaggttaatcgcgaggaaatcgatcgccttcgccctgttctccctcatgcggatcccagctcgtcgtcgggattgttccaattggaaatcgtcctctttggccacccattcggccatctgggcggattcggccagtcgggccagtcgagcttcttcctcttccctgagctgcatctcgacctcgcgttcggctcgacgtttgttcaggcgttcgagttcttcctagaaagacgaggaaacaaccggtcgtatcagtacccgagtcaaacgaagccggacctcctcgtcgctgggggggatctctgttgatccatctgacacactgaccttggcttccaacctcctgacctgatcccgcctcgccgcctcctcatcgctgatcccgagcttcttctcctgttccctctttttcacccacttgaactgttgacccaagttggaatcgccaaacgggttgtcctcggccgtgtacatgctgatctctgcgacttgacgagcggcggagagttcggcttctcgtcgacgggcggctttggcggccttcttctcggcctttttgagagagtggggagagggggaacgagagctgtctcgagtgcgacggtgaggaagggggatatcagggacgttcggattgcaggatgaaacccgacgggacgagcgcgagaggtcgacgggggactgtttgttcgcgtcgacttaccggtgtcgtttcttcttcttctccttgtcccccctatccctactctcactccggtctctccgtcgtttagattccctctcccgacttcgacttcgactccgacttggacttggacgtcgacgagtttcacggtcgtcctcggcggcatcgcgatcccgaggtcgacgatgacgatccgtggcgtcgtcccggtcccgccgacggtcgtctgagcggtaacggtcgtcacggtcgtccctatcttgataacgtgatgacatggttgatggatcgtgaagatatcgtgtgctacgatgtggggacaggggggggggggttgggttgtatgagcggtgtttcaatcctttcaatggcgatggtcgagatggttcacgaggtcgagaccgacgtaggatagcctccgatgagatgcgtgacacggacatgaacatgttttccatcaacgcccacaccatccatgcatgatattgattgattgattgattgattgattgatgggtcgatgtccgtcatctccccctgtctctccccctccttgccttgccttgcctcacttgccttgatgtgatgacgcgctggattcgtcgcctccccctcgacgtcgctcgactcgactctcatcccattcactgcgatctcatctcatcaccatcgcatcatcaactcaatcatcatcgtccaaatcacttttgacaacgctttctctgtcaaacactccccacacatactctacctgaatcactaaataacaactcgacaacatggctgacgaaggtaagacggttcaaacccccctccccggtgaagggttgatcggaagcaaaactgtgattcgcctgcctagtaccacgatcgggagggggaaccgtctggctgggacgacctctggctctggcaagggagtgagcgggcaaccacctcacacctcgacctcacacctcactcacacggcacacaccgaccctcccccgaccgacatcgtacggtcgaccaagtcgagacagacatatccaaaatccgacctgcctcgcacccccttacccccttacttcttgtcgctcgctttctcgtctgtgtttaccgtcgaccaaccgccaacaaccacaaaagagtcaaaatgggtgttagtacaggggcaatgttctagtcaaaggcggcatacagggaacgacgacggctgacctagagatcgggaaactcttctctttctttcttcttctcttcttgttctccacgatctcttcttgatctacgtaccgctttcgcatggcatgaacgacgacctggacccgaacctgcatgtccacagcgagttatcaggaaccaacgtaaatccggcgggatcttcaaggcccacacccacaacaggaaaaaccctgccaagctcaggcctttggactttgccgagaagaacggatacattcgaggaatcgtcaaggatatcatccacgacactggtcggtgagtcgcagcgttggcatcagacacccccccgtagcgttcgccgctgacacgcctcgacctacctgcctgttagtggtgcccccttggccaccgtcgtcttccgagacccttaccgatacaagatccgtcaggagacttttatcgccaccgagggtctctcgaccggttcgtttgtctactgcggaaagaaggccaccttgaacattggcaacgtcctccccatcggacaatgccccgaaggtaccatcgtctgcaacatcgaggaaaagactggtgaccgtggttcgctcgcccggacctcgggaaactacgccaccgtcatcggacactcggtcgaggacaagaagacccgaatcaggttgccctcgggtagcaaaaagaccatctcttccctcgcccgtgccaccgtcggaatcgtcgccggaggtggacgtgtcgacaagcccctgttgaaggccggaagggcgttcttcagggccaagggcaagaggaacaactggcccaagactcgaggtgtcgccatggtcagttcagggtcgaggtgctagtgtgtgcgtgtgtgcgtgtactgatcgtcgtgtctgctttgatacgctcgtgtttagaaccccgtcgaccacccccacggaggtggtaaccaccagcatatcggaaaggcttcggtgagtgcaactttccgtggcccggccatccgagttcgagttcgaattcccgaggctgacgcacacgcgcctcactgcagaccatctcccgatacgccagtgccggtcagaaggctggtcttatcgccgccaggaggaccggtttgctcaggggtaccgaccgtaccgagatctaagcggtcagcgcgaggtctggttagcgtcgtcgtcgtcgtcgtcgcaattcgacgtcggcggcggcaatgtcgaacccgagctagggctgcaaaggacgatcatgtcgtgctgcaaagggtggatcatgggacgctacttgggcagatggtcgtcgggatggagtcgtctggtgatcgtgtcgtagtctattatacatcattcgtctcgatcgagtgcgcgtgggtcgtgggtcagagtgacagtgcaaaacgttgctcgtccactacatcgttcggtgtaggatctcgtcctagtcctctgcgaattgctactgccgggtagctgtttcttgcatacacaggttcactcgtcatacctccaaccccggttgtcaaaactcggttcacgtctctgtcacgctgctcggatcgatcgctatctgggtcattccatctgattatatacgcgctcgactcgtcccctttcgtcccgctcaaccttgcctaacacctccttctccctctctttcgtcctgcctgccatcctccatgcgatcacccgtccctcccatctactcgctcttcttggacctggccacggccctctcatgcaagtcgagtccgaccagctgcaaagtcaagcaattcacgtgtcattatgggatgacaagaccgatgacgacgaccgaccaccgccgaaactcacaatcttgctagccttccagaattgcacgacgttgatgacgtttttcaagaaacagatgggacccgtgatgacggccaagatctggggccaggtcatttgtttcaaagaccacacgatcaagttggtccacccggggaacgtgtggatgagtttccaagccttttcagggtgggacgccgtagtgccgagcaaggtccggacgatccattctgtccacgaactagggaggagcggggtcgagtagaatttgttcaggtagagacacacgtaaaagagctcgttgcaaaagcagacaaagaagagcgtgcgctgcgaccgtcaatgagagagaagcgaggggtttagcggcgagtcgatgagccaaaggggttgaaaacgtccacccacgctatcgttgtagtagtaccacaagatcctgctgacctcgctcgtgaccgtcttgtgactggccgagccggtagccaacgagctgggacgacgacgcgacgatcgaacgatgattagctgcgggacgacggaggtagcgatggaacgaccccccgggccgacactcacgagtacatgtgcatgtagtggctggcgaaatccaacgagatgagaccttggaataccagggcgtacttggggtacccggccgccaagaaacagagcaagcacgacgtagtgcacctgcggcgggacgacaagcgacgaggggatgatccgtgtcagcttttccgacgatggagtcagcttccggcacgcatcgacgtacctatcggtcaccatgtcgagcacggcgccaaacttgctcgtctggttcaacgacctcgcggccatcccatcgacggcgtccaaaaggcaagagaccccgtacaacagggtgcacgccttggggtggtatggcatgtaatacagcgcaaaggcggcgaggacgactcgggagtagccgatcaggttggggacctggcgtcgggacgagagggtcaggtttagcgtgaggcagttcgcggtcaaacacgcaaaagggctcacaaagagaaagacgttttcatcggtcgtcaaagtcctatgagggcggggatcgttgcatcagctcggggtccgaacggacgtccatgacgggacagccgactcacgcaagatccacggcactgttgcccaccgaccaggtcgagtccatcggtcatgcgtcagcgcgtctccctccatcggaaagcatgaccccacgtagcactattgctctggcacgcactacttggcatccacatcctccctagtcttgctgctcgatctgttcctcgacttggtcaacacctgttgctggtccatcttgttcgaggtggaagacgtggagacggcgacgttgccggcgcgttgttgcttgatcggggttgaaggtgcggattcggctggaggtgtggcttcagtgccggctcgggtagtgaccatgtcgacggtgctgaagaggtctttgctatgtagcgtaggatggtgagcagtgttgacgacggcgacgagctgagcaagacaagtagacgagtggtgtgtgttggtgttggtgttggtgttagtcgtgggctctgtgtgcggtgacgacgacgacgtgaccaagccgagtcgattgaactttgtttcggcgcgcgcgcagagttgggggaacactgacgtaggtcgaggtcgaggtcgaggtcaagaagtttgtttgaagccgtcagccacatacacatttcacggtcgagaacacttgacagatcatacagcagcaagatagcaacatagcaagacgtttcaaaggctgagacaacgagtcgtggatggacgggcaatgattagtttcgacatccgaggcattacacgacgtcatgcgaaagcagaaagcgagattacgaatgttcgaggcaattaattccctacgcatcatcgcaaagtgaccaactcttcagccgaggtggggtctgcgagcgggaaagacgaccgaatccatggttttagccaccaaaaacgaccgatcgtgccgatctttcacacgcaacctggactcacggatggcgacacacgaatcaaagtcggccttggtagcacccatcttgatggccactccgactacgcaaaaggcgagcgacatgacacgcatcagtctccgagtgtctgacctcggcaccctgcccggactcacatccttgcaacatctcatcgctaccctcgccgataatgtgcaggccaacgaccttttcgttgtcaccctgacagatcaacttgtacgacgtcggctgcttgtccttttcctcgagcatggcaaacgacatggccttgaactgccaaaggaaagcgggagtacggcgtgtcagtcatcataatcctcgaccctgacgaccggcccagacagacacctacgctggtattgtaaatggtcaaatcgtccttgccaaacttctcctctgcctcgggctgggtcatgccgatcgacccgatggtcggatgactaaagacgacgctgggcacgttttcatagctcaacttgtcgtccttgaatttctcgggaccgaacagtcggttgctcaaccttcgaccggcggcgatggccacgggggtgaggaggaccttgccggcaacgtccccgatgacgtagacgccctcgacgttgctgttctggtactcgtcagcgacgatatctccctgcttgtcgagctcgatgttgtcgaggttctccaacccgagcttttccgtattggcgtgcctaccgatggcccagagcaagacgtcgacctcgacgggttcgtcggacgagtcggtgtagaccttcaacccggtgctggtcttttccacacgcttgacgttggtctgcttgtgaatgttgacgcccgtcttttccatgtagtcgccaaggacgtcttgcaacatcgggtcaaacgtcctcaacaccttgtcgtgacggatcatcaggtgagtctcggtcccgagcgtatggaacacgccggccagctcgacggcaatgtacccggcaccgacgacggcgacccgtttgggctgttcctcgatctcaaagaacccgtccgagttgatcccgtaagacgctccaggaatgtcatcgtccgaggggatcgtgggacgtccaccgacggcgacgacgatctttttggccttgacggtgtacgacgacccgtcatccttggtaatcttgacctcattcttggagacgaacgaggcccatccttggtgataggctaccttgtcgttgacgaggttcttttcgctaaacaagggtcgaagcagagtatacgatcagtttcaacgtcgtcaggttcgagtcatgacgacttggacttggacttgctagatcccgttgagacgcttgatgtaggcgtccctcttgttcttcaaatagttccacttgaacttggggatggcgatctcggcggcttcgtcaccgaatccatagtaaggcgccttgcggaggttatcggcgacgtcggccgtgtaccacatgatctttttaggaacgcatcctgggaacccgcggagcgagggtcagcagccggtccctctttgtgacagtaagacgacgctactcaccgacattgacacacgtcccaccgagctgaggagaaccctcggccagtccgaccttggctccgtacgatcccgaagctcgtctctacacgcgtatcgagtcgagcgggtgggggatcatcagcgccagtatgggaaacgcgccgggggtcatgagggtgttcgacgtacggcacaggcgagtccaccggatcctcctccgatgacgaacaggtcatattcagtgccctcggcttcgtccttggtgataggaggcatcgtggtgagcgtccttcggatctataggacggttgatcgtcatcgacgacgtggtcagcgcgcaagacgtcgtcggggtgggtgtgctgggctggacctacgtgatctaatctacgactggcggtaatgacggacgggttggatgggaaccgaactgattgctgttgcctgttgatgctgctgctgttgtgggtggcgtaacgaccgacggtatggatcggacgaacgggggatgcgagggttcgagcgaggcggatgcgactcgaagaggtcagacgcggggcgagtgatgccaggttgaatgattttactgagcgagtcgttgaaagactacgacggaggtggcaggcaagtggcaagtggcaagatgatggaggacgggggggggggggtcctgtcatggtagcacatcgcaagactcacatcgagctgcttgcgttgctcctcggtggcatgcttgagcgcgacgttgatgttccagctacatttgttgtcctgcaagatcaccccccaccgacactatcacatcagcccaccccgccctgcaccggacctgaaacccccctcgatcgccaacccggactcaccaggatatccgtcccgatcttaccgaggacctcgggcggggcgtaacaatccaggtaatcatcctggacctggaaatactcgcccagaggcaaaaggatggagagggcgagctcgtaagccttttcgtccgtcacgtcgaccatgcgcatggccaacgccacggggaggtagaacgagtagaacgcggtcttgtagacgacgatcaggtgatgcctgtcgagagcgcaaagggtcaggtcagggtcgacgtgggtcagttcgagaggtcggaagatgcaaggggtaaagaggggacgaggttgcgatgtacgtacttttcgagggagaatttggagaggtcgacagagtcttccggagcggtgatcaggtcgatcaattgacccaactcggtctggaaagtgacctgcagataccgtcgagcggtttcacgaaaaaagtgtcgatcagctcgatccctcccatctgtctcgccgacgcgggcgacatgccatgatcactgacatcgtggaagagctcgagcaggtcgacgtagtatttctctccacggaaatgtttcttgagcaaaaagtagatggcgccttccagcatgaacgcgtcgttgatggcaatgttcccgacgccgggctgagcattcgaggtggtagcgagatggcagggatttcggtcagacgttgactagcaagttgactagcaagtgcggaaagcaccgagacgactcacgacacggtaccaacagggttgaccacgacgggtgatggattggtccatcatgtcatccgcgaccaagaaataggcttgcagctgaatcacgaatcggcaccgtgacggccaagcatcagtcatcccgcgctaccgactcgttctaacctcagcatgtggactcaccagctcaatacaccatccgagcagagcagccttgaagtactcgtcgtcggtgagctcacgggcacggaggatcctcacggtatccacgaccgaaagacctcggttcaatttcccaccaggcgtgttgtggttcaagacctgaggtcgagctcgtcagcgggtctttgacattgtgcgcggcataccaccagtgtcacggggtactcacatcctcgtaccacttcacggcgtcctgaggcatgccctctttcttcatataggtcaagagctcatccacgatcaagggaaagacgttgagaaagtcttgtctcgattctcccgtccgggcagggtaggcaggggagctagacatggtcgaagatctcggtgaggatggtgttctagtggctgaagagagggctagtagaagggagtcgtcgccgtagctactttgatgtcgaattgtaatgcttcgtcgacgattgaaagatgtttactttcccaacaaaagaggatcgttcgactcgggaacgcgatggggaaagcggaagcaaaagtggaaagcgggtgtatccgggtgctgaatttacttccgaccaactcgtcgagagcaaggtcgtcacggttgacctactttgatctttgacgttgcgagtctttcttgtagagacccgtaacagtctcgtgcaactggtcgttgtaaattgacgatcgagtgcagtacatccgaagttacactccaagtatggcatactatctcgccctcatttcgccaacggattcgcccatctacgagacctacctctcctcatcgaaacctcacaaccagatcgcatcctcgtcgacatccaactttccctcgtggtcgtcttttcccacgttcaatcatcaacaaaaccagtcctcccatcaacctggttcatcatctcaggctccggctttgccatctaaagacccctttccacctcagtttctcggcggaccaggcactccttcgaaacccaccgcttccaacctcaatctcgggccggatcgacccccacctcagggtgtagaaaagcacgtcatgcagatgatcgcgttttccagcttggacattgtggaagacgtcatggtcggcactgggagcatgtacttgaagatgatcgacaagttcaacgagtggaacgtctcggcgtttgtcgctccttcaggtgagtgtatcccggccataccatgtctctcgacacatcgctgatcagggtcggtcctttcttagtgaaattggtcattctccacgacattaaaaatgacgaaggcatccggctgttcttcatggacgtctgggaacactacgtcaaggtcagcatgccgcgatctttaccctcaccctgataataacaaaaaggctgatcgacccgacctgttttctgtggcattgacgagggcagacggcattaaaccccttctatacaccgacgacgaggataacatcggccttgttcgatcagcgtgtccgggcgagcgcaaagaggcatctgtaagacctcgaatcggcgggtggacggcgtcgcaaacgctgtagaagtacagggacgcgaagtgaatggcacaagagacgccgtagatgagaagaacaacgtaatgaggaggtccgtttgggggggatttacgaattaacgacggttataaggatgttgttgtatatcatgtcggacgaccctatctactggccagcaacggtcgtcacgtcgactttaagctcgatttctgagctcgactacctagattcactgacacgagcaactgagagcgtatcatttatagccggcagcaggctcgaagaaagctggtagagcagatgggagcaagattttgcaggagctatcgagtggcccaaggcatttacacagctttgggccgggtcatgtccaacctgtgacagatagcggacgcactatgggctatgccgttttgatctggggtcttgcacatgctgttcacaacgaatggcacgatataccgattcaacctgggagaggtgcaacgttgaaaaatgacaagcgatatctgctcgagttaacggtcgctagtatttggtgctagtcaaatggaagtgaaattctcaagccatcagacgactttgagtctttgatgacccttgtatgtcataccccagagggaagaacggaggaatcgagtgatgccaaaagataggctatgcaggtacactgtttgagagcgtccaaggtttcttcgccaagcctctgcagcaatcccttgattttcgaagtcaccggaagacacgaactctcaaaccgctccgcaaagactatgcggatcactctgagagaatcttcagagcatcatctcaaatcgtcaagttgtcgctcacgcattaccatcaagcgaaatcatgttcacggcgccaattgaggccaactgtcagcttcaaacgctctataagctgacatctcctcaagctacacccaccacaagatcatgtgacagtcatccgagaccgtaggcgagtatatcgagttgtgcataagttctttgtccttcttgcgcaacacgctggtacgttcattcgtgggacggtcgcggtctgatgacgtttgatgacgcagcctggatcgccagggcctaagaaaggaagtcatgatggatttacggcaggtgcccgatggcaatatgcgaccccttactggtgataactggttgcagatcgtcgatacctacgatggttgagctccgggttctgcttctcgcttgaaacgcgattaaaggcctttgcaacgtgaaacctcgcgcgtcatggaagctcgccatcggagtcacgcctggccacaaaggagcgataatcgttcgatgcttgaagattcgactatatatacaagcgaccgctgatgaggatcgtatgaactggttggtgttctacccggatgcaattaactcgtcctgcatcatgccttccattcaatccagcctcctacccttcgtcgagtcatgtgcccgtctcgtctccgaagttccttctttcccttacgagaagaagaacgatcctcgtaacgggatccctattcacctcactgtaagcgactttaccaacgatctggcccctctggcttgggtcagccaagattacgacaaggcgtgggatgaggagtggatcaagatgaccgagtacccgctccttcgatacgtggacaaggagacgggcaaggcgtgtcgatactttggtcaagccacgctcgagcaaggatctccggctctcacaaaggccatgtggtgggcataccttcttcttcgtaggaaaggcttgacaccgaactcaggtaatcccaggcccgagtccgttcagacttgcatgctgagcatggagcttgcagtcgtgaagccggagcttcaagccgtctttgccgaccctcgttcttcgtactttacctcggagcacaaaccacagtgagcgcattgttctgcactcgcgcgctcatcatccactctcctctgaccgactatcattgccatcgacctgcgtcggccaggctcgacaaccgcgtcctcgatttcccgcgtaaacaagtttccgagatgggtttcccgttctacggcgttttgatgattgcgcacaccaagtcgaagaccgaggatctcaagctgtggatcgccaagcggagtgaggacaaggttttgtacgtccaccgaccctgtatctatgacgtcctctcgatcgaacgtctgacctgtggaatgagatcgtgatgatcttagccggcccggcctatgggatatcaccgtctgtgggggtattccagccggtttgagcgtcagacagggcctggaaaaggaagctgccgaagaggcaggcatgtctccggacctgctcaagagcgctcggtaggtgttacacagcgcgctgaatttgcaagtttgcccctgacaaggctgatcatccaaccgtgtcgcgcttggtacgagcaggtctggagggttttcatcctacttgtcggaagacgggatcatcggcaagtctgatctgacactccacatacgatttgcacacgagcgataacaccaatttcgttcgcctttgacgacactcacatgtggtcacagaatacgagtaagcttgtcattgattcgatgcagaccccgttgtcagcgattgacagccggaatcgggtttccacagacatttgtacgatctcgaagtcgaggaagactaccgcccgacgcctacagacggagaagtcgaattcttccgagtaagtctactcctgcctagatcggccgcaatgaacgattgatcagttcttaacgacgatccgtctcagctcgtccccgcctctcaagtcctctttgagatccaatccgacccgtctcaatgggcatactggtccatactgctcatcatcgatttcctcatccgtcatggaatcatcaacagggacaatgaacctcatttaggcaaagtcgtcgggaggttgcatcaggatacgacgtttgtcgctaggagcgtcaggctggagcaacatcgaaaggagatgaggggagatgtagccaaggacaaggtcgagccccagaatgaggtcgaaaagcagtctgtgctcgagatcgagaccgttcagtgattcgtcggccgacgatgcacagaaacatcccatgtcgtcttcatgcatatccatggggttttctttctatgtatgtgtgaaaggacacagagaagagctccagcagcaagcgggcggtgtatgcacgagtctcacctctaacagccggtccatcgtctcgctcacagctgatctgtgccgcatcatttcagactagtgctgctataacctcgagattatcacagtcacctcggtttatatcccagtcatagattgtcaaatctcaaacggcagcggctccgcgcgttgagtgcatcaccgggtcgagtcacgctctagccaccaatctttctctctcttcttctgacacggtctacgggatcagattgatgctccataactgacctttcagtctgactgggctctgcaaagccggtgtgctcatgatgtatgagatagtattgactcgcatgctcgcttttcggttagcgcagatctttcccgccgccgtttatcattgtacagatgtgccacccgtgtgatggtcgcgcctttgaattggctgatctataattggagggtcgcggcacgttatctcttcagtggaccacgcgcggtcacgatatcctcctatcggtcagatccgaccggaaccgggggaaacgagagaatcacgtaagagcggcgaggggcggggggaggggggttgtgggtcgagcctgacgcgtgcggtgtgactagtcttcctggttgttactgttggtgatagtggtggtgatccgactagggatgaataggttggtctagttcgagacgatgacgacgagttgtcgagtcgatggggatgacctttgtgatgtggtagtggattgcgtatgaccttgaagccctgacctaacctgggttgtgcgtgccctggctgtgaagtgatgactgaggaggggagggacggagcgagcgagggccatttcgtttggatttccagtgatttcacacgcgtcaacatagggtagagtcgattttaaggcagcgaagagaaaggtagagggaggtagattactttgattacgtgatgtttatgtcacccaataacgtgatgacgagataattacgttaattccaagaggcaaatcattcccaagctagttcgctcgctcactttcttgataatttcgaacggatggaatcagctgcagcttacctagctaggcatcattcatcaccttgcccacatcaactatatcgctatatcatctcgcatctcgatcctatcgaccactcctcacatcctcacatcctcacatcctctgagcatacaagtacacactacactacatctttttaatagcctcaatatcgaccgcaactccccgcaacatgtccgactcgcacatgtttacctgcatctcatgcgccgtcgctttcaacgacccagccatgcagagatctcatttcgccagtgattggcaccgatacaacatgaaggtgagagacccatttccccagagtaattgtcccccatgcagtctttcggcgaaactgacgatcaaccgttgtcgtcgtcgtcgtcgtcctttgtcgccatcgtcatcgtcttcagaggagagtcgcctcgttgcctcccgtctcggcgaccatgttcaacgaaaaagtcctcgaaaagagggaacaaaacgccatcaggttggacccccgggctatgcactgcgaatgttgccggtgagttcgaggcgagaagggatcggaccgtctgggtgtgaaaactgatctctccatgtctacatcgcttgccttttatcctcacccgtccctcccttccttccttgctccctgtcttccttctcatccggacttgactcgtcgtcactcacaccccctacctctctgccgatgacgacaacgttccactcactttagcaaacaattcgccaccgagaacgccttccgaacgcacgtcgcgagcaagaaacaccgagtcgtggaaaccaagtggaaagccgaccaagctcgaaaccctgacgaggtcccctctgcgcccgtcaacgacgacgccgatgaggatgaggatatggaagattcggaagaggagagcgagagtgacgaacaggtggagagggtcatcctggagacgacgaggaaaccagaggaagaggtcgagatgaagatgcccgaaaaggtagtcccacccgccacaacctcgacctcgacctcgacctcgacggcgggtcaacagtctgcggccaacaagaagctctctcacttgatcgccgagcacgacgaggccgccgatgaagaccaagacgaggacgacgatgacctcgccctgacgttggaacagaaactcctcgcctcgcgttcgctccaccctacgcactgtctcttctgttccgtgaaatccgcctcgatcgaaaagaacctggatcacatgttttcccgtcattcgttctacgtgcccgaacgtcagttcctcgtcgacccgaccgggttcatgctctacctcgccgagaagctggccatcggcaacgtctgcctgtactgcgaggcggagttcgggaccctcggcgcggtcaggggacacatgaaggacaagagtcatcagaagattcgatacgaggatgacaattcccgggcagagtacgccgagtggtacgatttctcgagttcttacccagacgccgaggagaagcggttgaaggacgtcgcaaggaccgagaggagggaggagaggaggcagaggcgagaggccaaggaggacaagaggaggagacgggaggaagagttggagggtgacggtggttgggaagaggacgacggcgagggcgagggtgaggaagtgcaggacgacgaggtggacgagatcatcgtggacgaggcggcggacgattcgagcgtcgtctcggacgacacggacgagtcggatttcgaggaagacgaccatggcatctcgctcgcgtccgacggtctctccctgcgtctcccctcgggtcgaacgctcggacatcgttccctcaaggtctactaccagcaaaaccttcgaccggaaaacgaactcgcccaggattccaactcgaccgccttgacgaccaagctccgttccgtccgagctaaactcgccgatccttccttgagcctcgtacccgtcggaggcggatccggtgcctttggaaagggtcagatggtcatgaaggcgaggaatgcgggagaggccaagtgggcgaaaaagttgggaagcagtcatctggatcagaggagaaaagaggcgcccaggcatctcgtcagtatgcgtggaggcaacaaccagaagcattacagggacatgttgcgtgagtcgggcggctttgacagaacggtcgcgtgcgagaacgagatggctgatcacaaatttccgatttcgttcatcagtgcaatgatcgatgtctatcgttcagttgctgcggcttgcgtcggagtctttccggatctctcctagtattctgcccgacccggttctaaggtgtacgagcgtattgatgtattacgtcctgtgccgtggtctcctctttgtcacgattatatgctattcggcggcctgcatcaacaattcacacagaatcgtccaagagccaccgattcgtcggcctcgcgagctactcgagagatccgtcacaaagtataacccgctgttcatgaaggaagccggctaacgaaagttacccttggatcggccagggcagaaaccccgttcgcatccagggccctctaccacatcgcccaacctctcttcacattaacctgcacccatccatatccatcaacacctatcgtagatcaaggtgttgtttctgctgctgtttctgttgctgttcatgcggctgtgcctgtgcctgccgttgctcctgcccatcttcctgaccttagctgctcccatccttgctctttgggggaagtctttgctggttgtcagccatggcagcagcctggtcgtgaggatgtcccatgtccttgtttgtctggtaggaggacagccggtgttggttgtccctccctccgtggaaacgctgaaattgatcgaggatgatcagcaacctaaacgaaggaagagacatcgcgcttgaattcttggagatatacagcgtaggccctaccgcacgtacaagggaaaaagttgcttctcccatatgcggagacctcaccaacagctggttcgaagaagccccggactctgaccttttgcatcgcaggcagtaagctgcaacccacagccctaggttagaatccatactgccaacccccaccgagaggagggccgaaagtgactgaacctagatactacacaacgagacggaaggcgtagaaggagaaagtgaagttgattgaaggatcgcagatctcatctagccgcagccttcacattcccaaggccgtaactttttgtcacttcaaggaccgaagggattggttgagaggatacgagtgtatcatggctgccacaacggcgctcagttgagcttcagtcgagctatagagctgtaacgagtcgggggcggcttgatcggatatgtgaacgaatgatgaaggttcccgaatcgataccatgcgtgtcgcatcataagggtgtattgaatatcgatatccgatggtctccgggcccattttcatccacagcaaacatgtttcttcgacggagagttgccaaaggctgtgaaacgctgatgaccgcgccgggtgacattttatcatctagtcgcgcgtcgagggtgagcgctcacggaaagcgtgaatgcgtttcagggtgctccccgggcactgagtgtagtgttgcggccaaagtggcgcatgcggatagcacacgtcttgataaatgaacacaagagacggccactggaagtaacccgagcgacctcgcgatgatcgccaatcctgaaacgcgggactacctcgtaacccctcgattcggcaactggacgatccccccgatcgcctcgccttgtccagcgctgatgtcgctgccttgcttcacaacaagaccgttgcgctcctcagcatattgacctcagcccgtctgtactggtgagattggtcctctccgcctccagtgccgacgactgctagatccgacactccagaacatgatccatcgatccgtctcgatcgtcattcctcacagtactcagggccccacgtcccattcgttcagtcgagaccgaccgtgaagatcggattcgctctgaatcttcaagcgcacccaactcaccattgtacgtgtgcatctgccggacttttttaggtttggcgtgcgtgcgcatggaaatggtcgtggctgctactggagtgtcattccgggtcactctaggcgaagaaatcaagcgcaaacaggaacgcatgcaggtttccacgatcgatgatggagatcctcgggttccgcgagacaacaaactcggatgcatggcaaaaatcacccagaaacaagtagaaaagacttgcatctctgacccgacctgccgttgcccctctcgataccagaaaaggggtttcgagctatgatacaccgccctcagacctgtagcgcggtcactgctacgataatacgagatatcagcgcgatccaggtagaggtagcccgggatgacacagtccgtcgactggccgtgaaccccagcgcgtgcccgcatccagctttcatcgtcacacgagaaaccgatacgcccggtctcttgtcctctcgagacccctgcgtacgagatcgttcgactgggctaactcgttcatggggacgggtgagcgatggcctgcggacgaatttacggctttcttagctctcgatcgccaggactcgggccgaggtccatcgtaagcgagtagtcggggtagactatggaacacatgcgggaggtcttgtgacgatctcatcaggaggtctccagcaactcggaaaccgggacgatacggattggctctatctgtgttcggcgcgaggagtgtccgacattttcaccgggtcgatgccgagttcgaaattcggtgtgaacacctttgtgacgaacaggacggcatgaacggatcgctctccgtactcggcctcgatccgtatgatctcgttcacctacctacccatcctcgcacagcctttgtacgaacacatccgagccagacttggatctcaactccctttcgatttacaccacgatcccgatcccaagcccgatcccgatcacgatcccgagcttggacacagtccacacctctcattccagtcccctcgcagtccgttttcacgtaggatggtatcgccatgatcatagcatggcatagactaccgaccatcgaccccctccgccccggagcatggggactactcgctacaaccctaggctgaggggtttttgttcatacctaccccttgacgtcatgtccgagtttttgttttattttagagcaagaaaagattgggttggtgggtgagcggtgtgtgggtgtgggtgtatgtttgggtttgtgcatagttgtgaattttgttccgaaggtgtaagagctcgactcgatggaatcaagcgcgagttccgagtaccgagttccgaaagtccgtgtttgggtttgggttgtcgaggtggtttaatccggatgaacaggcgatcaagagggaattgcagggccgaggccacgtctaggcagaaggttcgttgatcttggcgaggatctccgagtccttgaacatgtagtattcctgttcgattcccgacgcaaacgaacacgaacaccgaccctgattatcagctacagtccgtgactttccgctgttccggaaacctcaacctcgacctcgacctcgactgacctcgtcgccgaccttgatactgctcccgccccaaccgggcaacaagaccctatctccggctttcacgttgacgggtacgacctctcccgtcttgggtgagggagcaccgggaccgacggcgatgacggtagcttccggcatggtggtggatgtcgaggaagaggggatgaagagacccgaggcggttttctgtgggacagacagaggagggggggttgtgcgttgggttcaggggcccccgggctcgtcgtcactcaccaatttgatcgcgacgtacgtgcctccgaaccctacacctcccgtgcgcttcttcatacgcctctcaaactcgcccgccgtccttatacacctcaacgtttccatgaccctctcctctgtggcctggacgactttcgcctcgtcctccgtgatctgctcgggcgttttaggtttccccgaatgttcccctcctccgtgcgcttcctcgacttcgaccgagtagaccaacatcgtccctatctcttcctcccttagggtctccatgacgggtaaacaactcttgacgtcgtccccgcctacgaattggtcgaaaaacgtctttctcacgatccattcgctgagggtgcttacccccgggatgggcgaattcgtcaacgcgtcgaggaggacgggcgagtaatcgacgatgagcgggagggaggtaaaggtgtataccaaccaggtcctcaagagggctgagaagggcgtccgggagagggtggtctctgtatgtctgttatcgctcgcactggccgaagtgagggggaggagtctcatcggttcttccccctcgatggtgttgacgtcgggatgctgttcagcgtgggtggtcggggtcaacaagtaacccccggcgcctgcgagcagtaatgatccggcgagtacgagtcgaccgggtcgggtcgacgacgacggggtcgagtgtggacctctggtggtaaacgtccgtcgtgcgatccgggtgagaggttgcgttcggcctagacctacggatcgaacgaggccgatcgagggtatagacctcgggttgatgaatcgggctgacattcttctgttctccaggaagaggaaagggacaggtcgtatgtctttgttgctggcgaggtgggctcttgcagcgagtggaacttatagtccaaaaagtggtgcgggtggtgatagatgggatgaatgagaatgatctcagcagacccagacgacgaggcaagctgagaagacgctgcgatacctcgtgttttgatcacgagacgacgacaacctcgatcgtgcgaggtgagacgagaggatgagggggtgaagggatgaatggatgttgatacggtggacaagtgtttacaaagggagatttgcgacccgacctgtccccgcgaactgacagacgacccggttcagatgcagagtatatatatatctcgccctcgcttgtcttgcgacgacgacgaagacgacgacgtctaggtgtttctgtctggatgttgagcgggaaaaagaaagggcgacgagggagagcggtgaacgaggttcccaacatttacccctatcttccgggtggttgcccagcttgcaggtgaccgttcggatgtaatcggatgcttttcgagtggaagataccggagttagagcgcgccacaccagactcggtaggggaagccatgagtgagcggcaaagtcacgtgatgattgccgttgttgctgttgacgtaatcactcacgtaattcactagccggccgccttgcctccagccgatccgatgccgtcatcgcccgattcggccccgaccgcacttgtcccccccgctcttgcttctgttttgcctcttgatctcgtgtttgtcacttcaaaataaactacgacgttcgagccccccaacaaccataactacaaccttccacatcgacaccaacaccaacacaatcaccacctctacataaatcacaccacacgcacactcgttctccccttgatcaatcaccttacgcaccaccccttttaccccacctcatcaacccgacacacatccgctacgatgcccgtcagagacaaggtgttcagcatggtcgatgtggcgaaacgtgcgtattcctgcccgatcttttccattcaccttgtcccatcgaccctagtacgctgacatccactcacggccctcccccagacaacacggccaaatcactctggatcgcctaccgcggcaaggtctacgatttcaccgggttcgaagccgatcacccgggcggcgatcacctcgtccttcgatatgccggtctcgacatgggcgaagccatggccgatccttccgaacacgtacacagtcgatcggcttacgagatgatggacgagttccagatcggacagttgggcgggtcggaaaagattgtcagcgaggattgggtccccgacccaaacttccacccagaggataccgatacgctcgccgatttccaacggagcaaatttatcgacttgacccggcctctcctcggtcaagtctggcgtgccaacttttccaaagagttttacctcgaacaagtgcatcaacctcgacacgtcaaggaatccgcccgattgttcggttcagacctcttggaaccgctcacccggacgaaatggtgggtggtccccatgatctggctcccgatcacctttttcctcggagcgctctctctggcccaattcggcgacgtcaccggttcctttggctacaaagacctcctcgcccacctcgcctcgccactccgcctgtccagcccgagttccacccccttgccctccctccccgcatggtcgacgacctcgactttgctcttcagctcgtcattcgcgctcggctgcttggtatggacgatcctcgagtacacgttgcatcgattcctctttcacctggatttctacttgccggataacggggtggccatcacgttgcatttcttgttgcacgggattcatcattacctgcctatggacaagtgagtcggacccgctgcctcttctttgtcgttcccacccgtgctcattctcgctcccgctctcgccctcccgctcgcgctcacaggcttcgactggtcatgcccccgaccttgttcttcatcctcgaaaccccattcacccagctcgcacacgtgctcttccccaaggccatggccaacggggtcatcactggtgcttttgccttttgtgagtcgagcatcgtcgtcccgattcacccctgctgtaactgagctgacgtttggtctggttcaattcgacgcgacatgacagacgtcttgtacgacatggtacactacttttcacaccacatgagggtgtcagaggggtacctcgccgacatgaaaaagtaccacttggcgtgagtcttcgggaccctgggttttgtcgtcgggttagagtaccgcagagctgacctgtcgtgtgatggatgttgcttgtcgcgtttccgtctggttctatagtcatcattatcagagtgagtagtcctcaactagggtccgccgtgtacgcgggatgctgatctttcttttcttcgcctttcccttccgaaccagactttgatcttgggtacggggtcacctccaagttctgggactacgtcttcgggaccgtcctccccatggaggtcaagtgaggccggtcctctccgccccgtccggcccagcctcgctgttttccaggatctacccttttacgtgtttccataacccccttttccggcgaggtccgacccggccagcgcttatacgttcgtttcccctcgaccgaccgattagacctacccgcgaggggggggcttgggtatgtatcgtactatttgtattcttaccatgccgttacaggacgagcgctcgtctccctgacgccccgtctgttcccctgcacgggcaaggggcgaccccttttataattctcatcacatgaacgatcgtggatatatagatgatgccaatatgatcgaaaccccttggtccgcggtggtagtgtctttagctttacgagatgcgatcgtgctcaacaggtccagatcgtgcgcgagacgacgagatggaaacacagatacaatccgtgtatggtataacggaggcgtcatcatgagaaacattgacacagagttcgttactcggttcgaaatatcgagaattaaacaagaacgtggagctcgatcacggggtgtaggacatgcgggcgggcaaacgagaggcgcatcgggttcggacaacctagatgtgtcgtccggtcacgccgggttcgctgccagcctggttcttgagctgttgagcctccatgaccttggcttcacccttggcggcctgtcacgtttcaaaaaacggggaccggcatcagtcatcgatcccggtcgaggcggctcgatcgacactcaccatgctcttcatgcccaacatgctgccaatcttttcctgagtgtgtccgctcttctcgagcttttcggcttccttgagagtggcggcgtcggcgtggtggtgaccggtggaagaagtgttgtggtcgtggttgccagtaagaccggtaccggtgtgcgaggtaccgtggttgccagtaagaccggtaccggtgtgcgaggtaccgtggttgccagtaagaccggtccccgtggtcgacgagtgagtaccgtggtttccagtcaatccggcaccggtggtagaaccgtgagttccggtcagaccggctccgtggttaccagtcagaccggtaccagtgctgtgagacccggtgaggttgtgatcggtcgaacctccagtgagaccttgtccgtgggtgttggaccctccggtgagaccagtaccgtgggtgttggagccagtcaggccggtggtgccatgcgagtgcgatccagtcaaaccggttccgtgagtgttggacccggtcaacccatgttcgtgagtgtgagtgttggatccagtcaaaccggttccgtgggtgttggacccggtcaacccgtgttcatgagtgtgagtgttggatccagtcaagccggttccgtgggtcccatgggttccatggaccccgtgggtaccagtcagacccgatccttgagactcgtaaaagtgatgcggctgcccagtgtgcgagtcgacgacggtggccgacgagcccgagtgatgtccggtcaaaccagtggtggcacccgtacccatggtgtgggcaccgtgagtcccgtgcgtgccgtgggtcgtgtcatgggtcttgttgttaccgccggggaggatgttggcagcagtggctccgagcttggaagaatgagcttcaccgtgcttgtcataagccggggcgttggtaccggtgtgggtggtagtgttgttgcccgtcaaaccggtgtttccgtgggtggcgttgtgaccggtgaggccggtaccggtgtgggtcgagtcgtgaccggtcaggccagacgatccgtgagtggtgttgtggccggtcccagcagtgtgagcatgaccagggttggtgtgctcaccggttcctattcaatatgcagcgccaatacgacaacgacagcgacaatgacaggtgagccttctgaaactatacgctgctcaagtttcgcccgtctggtgacttaccaggcaagtgagatcccgcgacgtgggctccgctaccaggaacgtgatgtccgctcataccctcaccggtcttgccgtgggcatcgacttcggggtagttgttgtatccggtaccggatacgggtccggttccgacggcgtgagtacctcccgtagtagggtgggtcgtcgaggtgttggtgggggtgttgtctttgtgaccgattccgaagaccatgatgagagatgtcgattgcgagtttgtgtttgggtgattgtcagaggaagagatggagtttgataaagtgtagagtcgaggtgttggctgaagagaagaaagatcaacctgatggacgcttcctttccctacttatatactcgtccgcttagtccgagcacgacctcgctgcacagaaatgtcgtcatgatcagcttgtccccgtatcgtctaacgcccccaggcaaggaccatatagacttttgtgacgtcacacacgcatgacacggcacatcatagctcatcatcatcacactgaactggacgcttgttgtctctcctttcgctgcccgggtgctgccccccgtccgcccgtcgtcttcaacgctaagcttagcggtggcgtagatgcaaaagaacagggagatcagctgaaacggcaacaacaacagggagagggacggggtcaaaggaggaatagcaggccagtctcggctcaaagtcactacccccccccccccccccccgctgtcgccgtcttagcgctgagacggtgccgagccgacccaagcacgaggtcgagagcgacgatggtggccgacgatcacgggtcatcatgagaggctttttctgcgtaaccttgtttgttcttttccccttgctgcggaagccgtcgcacttggctgggtcgcgtgacagggagtgaccggggcaaagaggcacaggggaaagccatgcggtcacgcgcagctgcgcacaacggggggggggggggggtgagcgcggtgaaaggccccaccccccatgctcaacatcccgccagccccaaacactcaccgatataactccccgcactcgccctagaatccacgctgacgataatcccaccccggaacctgaacgcgagggtggtggtaccgtgtgcgagcttgatcttggctgatgcgttggaggacatcgagtcggtgtgatgggagaggaaggccgttggctggggggtggtcaaaagtggtatgaagacgaaatgaagaggcggatcgaggtttggttgtggaggtgatgaagatggtgaagatggtgatacggttgatagtcaaaatgaagttgaatttgagataggggttgaagtttgaagttggcgagggtggacaaaggaccatgtcgagatcgaacgtcagcgaccccgtttacctcccctgccgcatatctcgaccaattcgactcacgtcgggcaccctaggaatctccatacccctgacgactccattctccatcaaatttccaaaccctcccgagctaccccactgggcgatcgaggcatcaccaccgtcggcatggtcgtattgggagtcgtcttgcatgaggtgaggtggacgcgcgttgagcgaggcgacgagggactccatttctaatcaggttttgagcagaatttgggtggtgcaagttgatctagctcgaaatcctcaggtcgtggtgaatgaaagagtgatgggatgacatatagacatcgatcctggtagcaggtaggtcagaaagtggtagtcgatgatggttgatgtcgaggacgatggtggtcgatacgcttcgtcattgaggtcaaacgcgaatcacaaatgacgtgcaccgcggattgatagacgcagaaaatagacaaagccgcgtttcaggtcgacctcattttctcaaggttcagttgagtataagtactacgagccttcaacagctatatatcaaacaaatcgtggaagctcaggtaaggcaagaacatgcgaggtgtaacacgagcagtcggcagctagagctcaacgtcgaagataaggagtataaccgagaacattctcaagtcgagtgcgagatcgatgacgtcaggcgtgtgtcgatacatctggcgacaatatgactctccctcccgcgggattgtgcccaactgcgacagaatttcgatggaacaggccgagagcctgaagttcgaaatccctggtactagtcctatgcatacctcggctttgcgttgacatgggtatctggagcggcatggaggacgggcttgcctgaatatcatgccgttgcttgtgccgcatacttgccttgaagaaatggtgcactggaataacccggccaagatatattcatcgggttacatgaacgcagactaagcatcgatccttccataaagcgactattctacataaaactagttctcgtagtcagacgggggaatatgtccaaggctgtataggatcacgttcttgcgtcgacaagatcatcctgtagaaattcggcttgttgctgtacctctcgatttggcacgaaacccaggggtactgtgcgtgtcctcctttctcattttcgaattcgtatgtccaacgggtagatacgtccggccatgtcatgttcaacccatgaaaaatagagcatagaccgctacccagcgcgtcacctgtctttgacgaattgtacggagggtacgagcgttcgtccgccccgacgattttgcaagacggagccccgggatcgtgtaacaagtgccatacctcttgctttaataggaacttggtatcagcaatcgattccatatttccgcttcgagatacatacgctcgaacttaccttttcatcgcgctcctgaatgtaagcttcgtcgagctcatgtctcgctgagatgacggcagccaaccgccgtgcgaattctgtccgttccagggtcccggtgtagatgatgtccagatcgcctctcagcatgagaggcgagaatttggccgaatccttgacaacaataaccgtaggcatgactaccccgcttctaaattcatcgacgaacgttttggcgatggccagaggattgtaaccgattctctcatccatcttgagctccggaaaattcgcagggtcactgaatgcactaaggatttcatgcatttcctgaagattgtcagaggggctcatcccacttccttcgtacagcgttcctgctgcgtttgaaggttcatccctggtcattccggatagatctggttgcatttgcgtgagaggctgcccaagggaggtactaggcggcggaagacttgagcctagatcggagggccacgctctagacgtgcgaggcccggaaaaggctagactcaagtccgctacttcagggctctgaccatacacccctcggggatatgggccttcgaagggtgcgtgaccatcatacccgctactgtttgccgaacgcgtgagacttgaaaccggtaaaaggtaaccgtctgacatctgggggccagatgtgtttgaagcagaaggaggagtagaacgattttcaggaggggcatctggaatgttgttaccaacaggcatgatgtgctggcccttgtaaagtggaatttccgacaacttgctgtagacgagtggtgccagattgccatgagacaagaagcgactctatcgatcttgaccggtatatatgctgtcgtggatctcgaaatcgctcgtcagcggcaagatccttgtcccgcctcgagcaaaggcatgatcgcaattttctacttcctttatgtagatcatgcaaacgtgatctaggtttacaatatagctggaatacgcaagcatcatgtgacggcacgtcttccactacatgctgatgggcccgcgctgatcactgaggtcagctgacttcgcacattttgtgaataatacagtctcatgcggtcggtcatatcctatactacatgatgtacactgatcactgatcaggtgattatggtaatcatggctgaggatcatgcggaacgcgtttaccgcgtcgcacacaaagaacggatactctggtctgccctcttggctaacctatccctcgtctattcgcaaactagtatatgctcggacatgctggagatcgcccttaaaagactgcgcaggctggagttcgccaaaggaagagatatggccagtccttcgatggtttcatccgcgttccttacctatcatcgtcgacccagttccgtgttggcggtggatcaagcacatatcctcactctacctagcaaatccacacgctgatggttatcaacgggcagtatcaccaccacctcgacaactagctactagagctgacatgatgacatagttccccgatggaatcagtgcaggggagaacatcaaccgcgaagtgtaggtaagaccgacggtcaccctttcatcgacctactttccatgttctggcgcaatcggtatttgtaatgtcgtacgccatgagacacaggattgctcgcatttcgcacgaaatatatctcgttcacgatcaaagtggcaaagctccgatttagcgattagcgcgaaggtgacagagcatggaccaagtcaacagatagagaaacaggagctaagaagctgctggcctgtagtcagtcctgtcttgggtcggaggagcgaacttgcaataggcgcttccctagccacaataaaaaagttgattagccccttgagcaatcggcatcggttaagcgatagcaagtttatctggacaacttgcaactagattacgcacacacgagaatatcagacgttcacgagtaggcacgttcatgagtatatgaaagggccaaccacgcgcacttttgatcaacacgttcagagcggcaaggtgactaagtattgtggacttctctaattactactgttcttaacatcacgtgcggtctagcgtggacaaaaccacctcgaaaaagttgctgcagttggtgtatctctcgatcatgcgcggatatgaaggggtaaggtgcagcagggtcatgacgtgcaccgcggattgaaaacagagaaaacagacaaagtcacgtttcaggttgaccctcgacgatcgacctgactccgagcctcgtggatggtgcgagtagcagagacgaaatcaaatacctctgacactttacagcgaatcacgtaactatatcgcgcgtttcctttcctactactagagtacgtgtgacggcgttctactactaccacagaccatccgcgtcactccttcgacaagatcatcttgtaaaagtttttgttgtccgagtacctttcgatcttgcacgccgtatagggattagccgcgttcggttgctcatcatccttgaaatcgtaaatccaccgggtagatccggttttccctgattgaacaagggaatcaaggatcgacttcaaggctggagccaaggggttgtcttccggcaggttgtcaaatggaggaagaggcagggagttttctcgtacaaaggtaaacggattgttctcatttctgcgggagatataccatgtctcctgagaagcaaaattcgatgggatgcaacgacagttgtaaagattgttgcccggcagtagtctcaaagtcggagcttacctctttagactggttgcctgcgtcgggtctcacctcttcggactggccgtctgcgccgaggcttacctcttcagactggccgtccgcgtaagtgcgatcgcagcctaccctggctatgatgacctctgtgagcttcctgtaaaacagcgccatatctgagggcctttcgttcaagaattccacgtgacggtacccggagggaatcgtgaaattcgtgtttgccacgacattgacacgccaaggaatgacattgatgctgataatgtagcgataaaccatgagttctgacggggtattgttttccctgtccggctggagccggtcggtagccgacgtgctggacgttgattcagcgcctgcggcctggtcagtaggccggcccgactcagatagatgtgtggaaccctccatgtctgaaggcccatcgtcatcggaagacgtgtctaccacagaagggaggctagcggtaccctcgggagaatcgtattgcatggtgtctatatcaggcatgatcctgatcttctcgaactcaaacttcgggcagggaagcgcgcggggagggggggcttagttgaatgagtggttctttgacaggttgatgctgaagaagcgaactcatctcttgtggtttatgtatatgcggtgccggagttcaactcgtggatcagtggtaaacgctgtctccagctcaaggcagcgagacctatgacgtttcgtgcttcctttatctggagtatcaatgtcatctaggttgcccatacagtcaggcaacgaaagcgtcatgtgaaggcatcgtgtgaagccgtcatgtgacggtgtgctgtacagtacaatggaggtgctgaaatcccgtacgtagagtatactcaggttgcacgctagtgttagccgtcaatgagcggtaccaacaccggcacagcttctagcctacccgataggccgcaccatatactatatccaagacgtttttcgaccatgttacgtttcttagctgccgctgctgaccccgctggacggtgcacgtgaaatgaacgaagcaccttttcttgccttttcaacggagcttgtgcgcccgaattatttgacatgcggatcgtacactaccttgagggatagaaccgacacgatgacatagttttccatcgaaacggtgcaacggagtacagtttgcatatggcaaagttgaccttaaaaaaaccaatggtaatcctttcatcgatctcctgcccttcagttggagcggtcgcgtgagcgagtgccatggatagtagttggacggtgtcgccatagatcctctcctttgacagcatgcctgatggcatgcgaatgattttcattggtatcacttatgagcatggttaagtgcagtcttaggcccagtgaaatatccatcctgtacccacgaccctgaggtcatttacaagggcaacggcacgtcatgcggcgacaattgtcgttcggtttgtgccccgtcgccgtttcaggcggtgggaagtggcgcgaacatgggtcatgacgggaatcaaagctgactgattcctttgcccttgggggtcggtgagctgtcgagatcgtcgagtgattgtggtggtatacccgcgcggtggacgaggggggggagagggacaaaatcgttgtatgtctttatacggctcgggccatatacatatacctcgttcacatcaaagatcaccaaagcggacctggacgccagtcgaacggatcgttgagactggtgtccgtcgagcggtctgtggcgcctatgaatgacgggagcgttttgcagctcgtcgatagatgaacactcctaacacatgcggctcatagccgcggagctcccttgacgacagtttccgaaaaccggacgttgacgcagctggctatgggtcgactctgctttcagagattgttacagagaaaaagaaatttctgcgtcacatgggtctcatctctctgtctcgcgctgcggagcgcccaaacgcaaagtgaatataatacaaataatgccacgtccatatggtgaacgcttgtagactacgggatcgatttcccctcgttacagccagtggtaaaggaaacaatcccggtactagaccttccgatctgtatagcccagacgcacctttcgcgtcttctcaactagccgagcgaagctatggccgccaacctgttttgtgagcatgggagtccatcgtgttgcatagcctttgagattatcgcccttgggtacgtggtcagcgacaaacgacgtacggtccagaaggaagcccgtcgttctgcaaaaagatcctcgactcgtaaactctgtacccggttgaggttgacgggacgatctcttcaattcactatttcaggccggtgtgcgagtcagctcggttggaggcgaggttgtcgaacgccgtgtcaggattgatgtcgaggataccacatccagacattcgcgaggcctcagctcggattgtcacttgcgagtgctcgtcattttaatcgttgcataagggctacacttttcggttcccgacggtgaaatcttcgttatcatacatgttggcagtcgggtcacttgacctcgcgctccaaccgttttcgtaccgcttctccatatctccacccatctactctttcttctgcttcttggagctgtcgtccttgcttccttctccttccttgtcgctgtcctccttttccctcttcttcttttcctccttctcggcctgcttcttcttgatctctggcatcatcttctcggccgcggcgttcatgggaccctcacccttcttgccggaaaacttggcaatgtcgtcgttggcgatatcctcgacacacgattcgtagaactgttgaaccagggagaagagaggtagcagggaagttagctttgagcttgggctgtcaaaagcggagcataaagaacttaccatatggtgactagccttgaaaggcccgttgtgcttcagctctccctcatgcatcccgtggatcagaccggggaagatcaagcacatattcctcccttcgtccatgattggcgactacattcagcgagtcaaatcaacgtggtcaaggggcttgtcagtttccggttgtttagttcgtcaggctacagctcgacgcacctgacacatcccgcaagacaccttgcaaggcaaaacgtactccatcttcttgtggttggtggagtaaaagtgcaagttgtcttctcccgacttgaagtgcatggcgtctttcggtacgatggccgcccactggtaggcttttagaaaggcagggtgttcaagtcagacgccgaggtcgttacaaagccggaagaagacttggcttactagcaccgtgagtcctctggcaggttcggcagtggcagtaacaagcgtctactgggtcttggtcgagctcgtactagagaagacagcaagaagagtcagctcaaggcttcacgcacgtataatgattccacagttcccgtctccagtttcgacgctcgactctcacctgtacgtttccgcaataacactgtccagtccacttggccttgaagccatccttcttcttctcctcggacatgcagtaaggaggtcggccctttcgctccttgtgttcctccttctgatcgggcttgatgtcgctcattttggctcggtcgtgtgatgcggaatttgtggtttaaggtgtgagggtgagggaaagttttgcaagagatagatataaagcaggaatgaggatgagatagcagactgtttgactagatgtatgttataccccttgccctagccccgaggctggtcgaggtcgtagcacgacgaccgaccttcttacgatcgagatcgagagaatgagttgaagcgatgatgattgcacgacgatgatgattagcagttcggctacagatccctcgtgtttagcgccaacacgccgagctcatgggcgtgacgagggaggattccagtgatggcgctagacacgcgaatgacgtcagctggctgggaaagtaaccgagtcgcgaccgatcgtcacgcgatcgaggtaagaaatagaaacaagaggtcgttctcgtttcagatgtgaggttggcggttgcgatcccaccatcatgatatgatggagatgcgaccgatcttgagccccgaatctgattgaacatttgtccagcccggtggcactgaggcggagatctaaaagttttttttgccatctgaattcggtgttagtcatcttgtcattgattcccagggcaaggttgagcgtgcatgcgagcaatgttctggtcatgccatcgcctgtaggtccaagcaagaaaggctgggcatgcaaccgaagcgtttttataacctgtgtcatcattacctgttggcccggacgtaacacgactcagacccatgccaagaccaatctcctgccaggcctgatgaaggcgtcgttcagccaagcaatctatcacgaaaagatgccaaataccgtttcgtgcctatagcagacatattcggccaatcgttccattcttcatcaggcgagaagaagaggcatacctagtcgcactccgaggcctatacccccattgtatgtggtttaatatgatgcgcttcttcacatacgttccatcctggcaatataccaaacagaaggtcgctatagacgtcgggaggggcggggggagattatgctcgacccagcttgcagaatcggtccgttttgcttttcgtctaccggacattttcccaccatctccaccaacaccacaaacagcaagtctatcaacaatgacaccctctcatcacagcaacatcgacctttcaacttgatttgagatgttctacctcttcttctaggccgcctctatcgcctcggtcaccgccatcttctcgttcctctctcgccgtcctctcgctcctcttcgccggtctcatggtgaaactcgcctgccgcctcgccttcatcgaaatcgtcattgacggcttgcgtctcccgcaaaatcttgacatccagcccgatctatcgattgcactcagcaacgcgtaattgaagagggtaggggtttgaggtgtattgttgacgaatgacgatgtaacatgcctcaactcgatgtcttcgctcccctccagccgactcttacaggaactgagaggactcgcacaagagttgtcctgttcttgcttcaagagaatcctgccggggaacacgccgcatccttgcaagcagatagtccgtttcggtccgagcttgaaccccttccatcttcggattataaagctttccacatgatcatcgcagcgccgtgatgcccgcgaatgtaggccccaaggcacgcgtcacgatgtgatcgccacagcttggtctcgattacgaactccgagtttcggaatcgccttcgtcggcggagggctagttccttcacgtaaacattcgtcagtcttgtcaaagctctgagctcacaccaattggtcgaggcagtacacccaagattgagcttcaaatgatccctcatgagaggaatgccgcagtgacgaggtgttttggtagtgagcgcatgcgacgttgcctcgtcggacaaagtctaaatatgggaacaaagaccacgcgcgacccgtgttacaccatgtctgtgggactcggtatcgacttagctggtagacagagcacgccgattctccagccgatcctatgtgtgatagcacgaggagcagttctgaccataacagagtcggcccggtaacggcgggagaaatctcggctttcggtcatctccgactgcgagggtggaggtccggtcccggtgtgcagcgtgacgtgctgacataccttgcagcctcccgctgtcggtccttcatatagcttccagccgcaagactcttaccgttgttgcttttcgtctcctcattctctgaagagccacgccctatatcctttccttcactagcactcagaaacgagtacagccttaataatgcctttcggaactaggactttgaacgatggccgcaagatccccgaggtcagtcctggccccgcagatcgtcgatccccttttccccatccagcgtgactgacgcgacgatcgacctcatgtcagatcggctttggtacctggaagatccctcaggaggcttgtaacgcccaggtcactcagggtgtcgaggtcgggttcgatcacatcgatacggctcaagcgtgagtggccgcggatggcgtgtcgtccggttcgattgaaccgcttataattgaggaatcacaatctacgtcacagttaccagaacgaggagcagactgggcaggcgatcgccgctgccggtatgaagagggaggagctttgggtcaccaccaagttcagcggaaggctcgggtgagtcgcatcgttaggctctcctccatgagatgcctggtcggtcgattgaccgatgtacttcttgcactaggacaggagcctctgccgtccgcaagtcttgcctcgagtccttgcaaaaggcaagccatcgctctcgagccgcatcatggtgaacgatcactaatatgcaatgtttcgatcgtagcttggactggactacgtcgacctatacttaatccaccatcctcgtctgtgcgatggggatatccgtgggacctggaaagagatggaaaagctcaagaaggaaggactggtcaagtccatcggtgtctccaagttagtgttcggcttgaatattgggcggaacttgtctgaatgcaaacggctgattgagttcactgaacagcttcgagattaaggacctcaaggttttgctcaagcatgccgatatcaaacctgtggtcaaccagagtgggtctagcgtgtccggtatggtacacaacctctccaaagcggcttgcttatcattcgctttccctctgtttcaaccagtcctgtaccacccctacgtatcggcttcgacccagccgctgattgatttccaggacgaccacgacatcctgttcgaaggctattcgggattgattcctcttaccggccgtcaaggcggccccgtcgacaagcccgtcgacgagatcgccaagcgcttgggtctgcagcccgagcaggtcttgttggcctggagcagggccaaggggtgagtcgatataagcatgtccgtgatactggtaatgaggaatacatgctgatacaatttccatttccttcactgcagcgccatcatcgtgaccacctcgtcccgatcggaccgattgacccgttacctcggcgtcggcgacatccagctctcggacgaagatattcactctatcgacaaggctggaaggaagggcgaggagaaggaaaaggtcatgggatggtgcaagacggccggcaaggtctgcctgctcggtggattgggcgcctatggattggccaaatggctgctctagtcgagtcagccttcaggcagcgcttgcaacaagtgtcttcgcgattgtattgtagccagagatcaaaatagttgtgaactgaaacgtcaaaggatatcatgttactcagaaacccaaagaccctctgtgctcactgcgtcccccatcgcgtcttgtattcccgatccggcatgtcgtcggggaaaggggtagtcgcgaccatgtggaggaatcgaaacgggtttctggggcgcgacacccttgaaattctccagcgacaccgagttcggtctctgtcgccccgtactcaccgcgtctcgcgcgcgcgcgcgtccggtcttcatttgctcgcgtttcgagggtgctcgaccttgaatcatcaccccggccctcactacatccccgcccatatcgtcccctccgtaccccttcggactcgtcggccggctgttactcgtagggatcgcgaacccgctcgtcccgtatcccatcccctggacgttccctagatggccaaactgatgaagtcccccgttgctgctgttgttgttgttgggattgttggggttggtgttggtgttgttcgagtagggagagaggggggacgaggtagatgacgaagggaggtgcatcccgttcggggggacatagtacgacatcataggatgaggggaacgattgttgaggtgtcgggatgcagagcccgaggacgtgggcgcggatgaaggtcctccttgcgataacgatgtcgtcgtcgttgccggtggtggtggtgaggaagtcttgatggagggtaacctcgagcgggtgggcgtgctggatggcatcccgatgatattggctagatgtcgatgtcgacgatactttctcggtcggcagtggatggatggaggaggcgccgcacggtcgcagtgacgaggagacgagcaacgacggcgaggacgacaaggtcgagtgtgacagacgtcgggggttcgggacaagtcactacggctgcagagtcttcacgtggccccgatcaactttactgcggggcaggagggggtttgtctgtgtgatgcggtgcggtggtctccggtggtggtggtggtggtgatcgagagaggattcgttctcgtccgtccgtcccgtcgtggttgtcggtattcggacaggttcgtgcgttttggcgcggcaaacgaggaaagggtgggaaggaggaaggaggagggggatggcacgagcacgagcacgaagagatccggcgaatgtcactctcaagcaaggaaaagccagagtggcgtacgtacagggggaagggaagagagccagatggtgtggtggtggatgtgtgggatgtggacgtggtcgatcgttctttgatcacatgggcggtcgttgagtcgtcggatcgttggtcttaagcggcgagaaacggttcaagtcacacgcggtagcggaccaggacaaaccaccatcaccaccaccgacgacatcaactccagtcgtcgtcgtcgtcgtcgtcgtcgtcgtcgtcttctcatcggatccgatagtccactcccgctcctggctttgaaaaccctccgtctttttggagctccgtgaggaccatctgtacgaaccatatcatcctcgtcgtcgacatcctcgccgaaaccccccccccgcacgcgagtttcgagttgccgcttccggctattcggggcccgaaacccccctgggtgctaccaacaagttgcgccagtaggatctatacgatctatacaactttaccggggtggacgattgtcgtcgagacgatcacgcagaccaggtattcgtcagactatagtgttgtacgatctacatgacgcccagggggaaaacgtctagatcttgccttgcccgtgttcgatcatatcacctatcgacccccggaaagtatccctagccgatcgagaattgcgaaagacgcacctcactccagacctcctcctccatgagatcaagtgtgagtcgggtcgttcaccacatggcaggagcaagagtacctgccagactttgaaccaccgtcagggcggtttgagtttgaggatgacccaaagaaaccccccatcgtctgtcgtcgatcgaccgggatcgccttgatatttcacatgctcatgtggcgtagctggcagagcacgtattagattgggagacaggtccacaacattgggataccgacccggtatgaacatattctcgtcttccgcgtcttggttcatggttctggttctacacgaagcctctgatggaccatcgtccacaaacgtatacgagtactcgcagtgccttccgtgcccgtgtacccgacctgtccatcacggacccgtcgactttgtgaagatccatatgctactacaccttgatatacgctggacgagcccgctcgacaggtcagtcaagctggagcccgttgatcggcgtcggccttgcataagagacggaagcgagccagagagagagggagaccatctcgtcacaggccgagctgtagaccgcctcgctgtcgattcccgcaatccgtgtctgcatgtgcaggcccttaagtggagattcgtcattttgaccaggatgggctttttcttccgtaactgcactctcctcagtgaagcggctgaggttgcgtcgtatatatgggcgtgctcattccggatgcactatggatgtacgtcgtctcgagggatcttctttggttcttcaagtagtcgttgatagagacctctgtctggcacccagtagtatgatctccaggtaggctctgacgcccctgggttgggccagagaccagaggcgaatggccaggctaaactgatgagatcagctgcttgggatgcgatccaagcgtggacggcggcgtaagacagcatttgctggagaatatcatgacggcgtcgaccttccatgaggaccgaaagcgagagatagacagaaaaagagagacatcatcatgctctaaagatcccggtaataggcagtcaatctggtcgtcctctgttccacggtcatgcatcacgtcctctccgtgaggataggtcgacaccttgcaaattttgaccatgagtggaatggaagaacgtcgagtcgatcttgttacctttccgacagctggcatcatggggacaggtcgggcaggttcactgtttgttctttagctagctcgccgtatgtatagcggggacactccttcaaccaacacggatctgacttgactggtacatctaaacacggcacagaagtcccgttcgatagcccgcagtagcatactcggggtataggacgatgaattcagttcgagtcgagtcgggatgcgtccggaagacgatttgagcagatcgtcatgttagggcgactgggaagggcgggtataccgtactagcccacaacatccaggatctcctcgtcgttcgtttgaagcctcgccctgcctgttgcctgcggtggaggtgatctcaaacgtccatgctcgacgacatgcgacatgcactctatatgacctgaaacgagatggacgatctcgcgcttggtcgaggatggcgacgcgcttttagcctactctgcccttccctcccctgccttgcctgtctcgggccaatcgtttctcctgtaaatgcatgcatcgaccttgccccggtttaccccgaaccacactcacggcgattcactccatcgacatcgtcgttgacatcgttcatacacatcacattttcgtgcaaacaacccaaccacctcgatcgacttccatcgtagctagctcttctcacgtcagacctcgctcatctcgttcgaaatggccatcatcaccgccgctcgtcccagcctcttgagggtcctcggagccggtgagtctttgccccgtcgtctaatcgattacgtttggggacgagacgacgtaaggagagagagagagagagcgatcggagtgctcatgcagtctttctctctatcctattctatcctccttgtcactcggatacgtgtggatgtgtaatgctggacgatacggatatcgggctgttgatctggacggacgggtgtgatctcctcaccgcccacggcccacggcacggatcgaccaacctcgaccaccacttcgatccaatccctgtaatccatctcgtaccatccgtcttcgtctcttgaaatgggtggacgggtgtcggaacgctctgaattctgactcgactcgactcgaatcgccgctcggtccccaatccgaccgatcttcataattccgtaccaattcgacccccgtctacccggcccggctcgatttggcatcctcgcctctcgttgacgttgaaatcggattggacattgatatcggacgacgatcctgtacatgcggctcgctcgacctcgtccatctgaccgacgatggtggaaccgggatgaacatgatcgatcgatggactatcgacccggacgtcatcctcggctctatcatcctgaatctgaatttgaatctcccgacacgatcgacatgaccggatctcaaattacatcgtcgataatgacatcgacatcgaccacaacgacgaccgacgaccgacacgattgatgcccccccccctcccccctcggccctttttcccgtgcgcatgcagctcctgcgctccgatcgaccggcatcttcgtcccggccctgttgaagcagacccgaaggtgcgtcatggtcatccagctggaccatctcgaaatgccacgaacatcacggcatgctgaccggatgccatcccacccctccgccgcggcccgtacaggtcgatccagacggaatccctgacccctcaggaaaacttggctctcctcaactctcagaggatcgtcaggcctaactcgcctcatttgaccatttaccagcctcaggtgggtgtcggatcggatctcacacacctcgctgacgctaacctggattcggattcggaccccgtcgacagctcacgtggtacctctcctcgttgaaccgaatcaccggggtggcgctctccggcttgttgtacgcgggcgccttgacctttttgttacaccccgtcttccccgcgatcgatagcgcgcacctgatcgagctcgtcgctggtctaccgggctggttgaagacgtcgatcaaggccaccctggccctaccttttaccctgcattcgttcaacgggatcaggcatctcttgtgggacgccgggtatggtgagtctcgcgacgagtcgtgacgaggcgaggcgagggggcggattctataggaacgggtcgactgatcatggtttggttcgtttttgctcgatcgatcgatcgatcgttgttgatcgtcggtggtctcgtggatagctctttctttgaagggagtgtacgctactgggtacgccgtgctcggtctgacggccgtttcgagtatcggattggccatgctctgagtaccaagttggtagtagagtagtagtagtgttaccctgtgtgtgtttgtttctccatgtaccaaccatacgatgacgatgacgaccaagatggtgtagtagtagtgtcgtcttgattagactgtcgacctcgacctggccgtgtttccaactttaatttgtaatttgacgcgacgcgacgcgttttcaaaaaagacgcgaacgagccgcgagccatctccatcatcagagacgagtctatacatctataggtctatgactatgttgatggggacagctggtagttcacaacgatcatctcgtactagtttcttgcaggtcaggaaacgtacatgaacatccacatctccgatctgtcgatcagatttccttaccatcccctccctctgccggcgaaacctcaaccccgaacaccctcgacaccctcgacgacatgagagtggcttcgttcccgcaagacggttcaggcccgtacgaccagctcaagggcaaggacaagatcctgtttgacaagatcgtcgtagggatagtcaatagcaaaaagatcgtcgtggtcgccggagcggggatgagctgttccagcgggatcccggtgagtcttttctcctgggggatgcgagggatacgggccggttgcgagctcgaggctgatgggcggtgggaaacggtttattctctcgataggactttcgatcggaaaatggcctgtactcgctcgtcacccagatgaaccccgcgccgacttcaccatcatcatcatcgtcatcgtcgtcgtcgtcgtcgtcattaatgccacccctatcaccggcgatacccacatccaacccgtttcaaacgggtaaaaacctctttacctcgacgacagcctttgcgacccctcaatccacctcgctgtatctccgattcatcgcttccctcctcctcgtctcgagatcgtctaccccgacgagaacacacgggttattgaaacgcctagaggagaagagcaggttgttgagggtgtggacgcagaacgtggacgggctcgaaggcagggcagggttgggcggagggagggggtggcatgttccgaacgtcgcgttcagctggggagagaagactcttgcgaccacatcacggccatcccgaacaagacttacggatcccataccctcaacttcccatcccatcctcctgtaaagaccatcctgtcgtcgactacagcgagacaactgatcgcctcttcggatttccctagtaccctctcttgacccctctcgaaatcccattgtcggagtcgtttgtctagtccggcggtataggcgaggtgggggttcgtcggggagaagccggcggcgaggatggcagccggggtagggtggctgcggggtggatcacgacgatgataatccgaggaacgatcggtgggtatggttgcagacgatgtcagttcaggcaggcgtggcggccacgaaacgcagggctcgatggggaaggactcgggactgacctggtgggtggtttcacttcgccgagattcgtgacatcatgcacgtccacttgctgatcgaaacgacatcgcggaatcgattcgatcgtcagctttacgaggatgtggcggacagtatcttcctagacgacgtgactcactccgctccaactggttaccaacaacctgctcgaatcgcatgaccaggagagtgccgagattccatcggtagggggttgtagttggacgtctgcgcgtgacggtctggatcagccggtcgagctgtttgggcggggtttttgcggcgtgctatgacttacctgttgacatggtgatcttatgcttgcctattcgacctcggtagcttggtagttggtgtagtgtggccgtcagtaaaagacatccctatgtatagattcgaacaacctcctccctcacctctgaccttgtgtttccttggtttccctcgagtctcggctcaaaaagtcgagaaagtcgttcaacaacaacaacatacacaacccacctctacttgattaccatgtcatcttgtcactcgataaccttgtcaggatagctactagaccttggaaaactatatggttaggcacttcgtacactctatcaattagcctactcgaaaagagcgctcgaaaacaccttgtcttgccccctttgagacaaccaacccgacaaccaacccgacttcatccaccacacacatgccacgactcggctggggtacgggtaaagacgacgatcgaggtcgctcagctccaatgcaaggggtcgaatacgaaagacccatggatcccggtcctttccaagtgcccaacaaacgtgagttcaagcgggagtctcggagacaggggaactttgcccgttgtcatcatcgtcatcgtcatcgtcgttgtctcgtttgctgatcatgcctactcgcacctgcttatcatcgtcacggctcttaccacaatgcaccaatatgaactcgatctcaacgtccaccctgactcacaggtctgcacacggaagacccatcaggtcaatcgacctacctccccctctcctctcactcgcacctcgcccccggtcctctcctcttctcatctccgaaccccctctcgacgacttcgggatccgctgggttctcacgttggtcctacaacagccctgcatcgggtcagactgggaggcaggaggacgtacaggatgtggatatgaaccacacggacgatgagaaccaggcgcccgggatgggcacgagagaggaattggtagatgtggagatgtacagcgattcgcctctcaagacgcagtcgcaaccgcagtcgcagcctcagtcgcagtcgcacgctcccggccacgtccatcaggatggcgggcatgcaaggatcaccggcgagaccggggccgagactgagggcgagatcaaatcgtcttcgtcctcgtcgatcctccgtccgatctccctgaacggggtcaagaaggagctcaagcggcggctcaaggatcatggactggatcgggatcgccacgattcgtcgtcgcgggtgggatccggagcgttggttatgagggatgacgatgtcgaggatgacgagggtgatcttaccatcgacgtgagtttgtcgaagagaatgatctcaagagtaatcttcgttggactgacaagacatgctcgccattgaatcgcacgcatcttgcaaactcgatccattacctacacctcgacgtaccgcagagcgagacatccaccgcaccccctacacctacgatcaaacgtcgtcgacccggcacatcccgtctcgctcagaaatccggactctcggcatctcacctcgccccctcgtcgtcctcgtccgatcggccgatcaaccagtacacgctcaacatgtacaacgcgccaggacagagtatgggtaacgggatgggcgtgggcgtgggagacagtcgggggaagagctgggtggatgccgaattgccttatgtctttatcgggtgagtattggcacggacatgctcggatttgtaggccgaactcgaacccgctgctgatatacttttcaccaacctcaccgaccgaccgacctggtttatcgcagctacgtacaattcgtcttcaacgcctcattgacgatcatgatcctcacggcgctcttttggttcctgtggaccatctggggggacgtcaaggatcttcgtggggtatattcgacgggtgagtccggcacgtcacgttgggagatgggtcctggtcgttgggagatcgcgagggatggcaagaagagatctgagcgtgggtacagctggatttccgatcgctgaccgtctgcccggctgtctttggatgttttgcggggggggtgaccgaatagagatcttgcaagagattagtacgtgcacgaacatgtacctcatcaaccggtgtgaaccgtccacgcggatccccgccatgtgagtcacccccgtccccaacatcgggcttatcagccgctcgtcgctcgtcgctgaccttttgacgactacgttgggacagggaatcggcgtgccaggaatgggagcattgtatgaaccgtgacccgtcggtcgtgagctttaccaaggtcggcgccgaggtcgtcgctggtgtcgtcggtggattcgtggacgcgcttagctggaggagtttggtgagtgcgagagcggcagagtcttccgatgatccacagcgggacgacgactgacgaggatgtcatgtctctcttctttgcctttcctacacgcctgcgacagatggccttgtttgggttattcccgctgatgatcatcttgacgaattcgaccctcttgaacgtccggaagaaacatcaacctggcgtcggcatgtcgggtcttcagcaggggtatcatcctcatcctcatgcccacccgtcgtatgccgctccgcaacagttgcatccagggtatcctccgcaacaggcacagttccattggcccccgcctgtcatgggtctcggcggcggggaaccgggggagaagcaaaaggcgggaggcaatggaactggaaatggaaatgcaaacgggtggttcgcctcgtcgtcgtcgtcgtcgtgatgctgtacacgcagacagacacgacgtgggcggacaagaacctgtttgcgggacgatatttgccacccctttttatcaactcctctccgcgtcttggtcactttttaaatttaattaaacgacgggtgttacctccatcccatcccaattgcatatcaccacgtacacctcgttgttctactctcttgccttggccatgtatcctattatcaatctcgatctcgattgtctcacgaacgcgaccttgtgtcgaaccttccagccctggtcatggtcgtcgtggctgttgtgacgcgtgagaaagctgaaatgttttgaattctctcccgagcctcagcctcagccaacgatgctcgccccgttgcgttgtcaatcatcatcatcatcatcatctggaacatcacacaaccctcaccacgaccactcgatctacatacatctctcactacggaaatcacgggtgagaatatactagccaggtgagtgtgccacatccgctcggggtcgcgtgcgtgcgtctcgtcctgggagttcgggtcaaagcacgtcaggcaggacgaggcaaagacgcacgcagcgtaccaggggtcagacgaccagggcgataacatctggacgatgggctgacgatcaatcattcatccattcatcttgttgttccactctcgtcccgatcgttctcttggatcatctgcgaatcgaaatcggaatcgatggattgcttctcggactccgctcgggatacgtcgggacgtcatctttgactcggaacctcttgttcgttgcctggctggcacgaccgtcgtcccttgctcgacaatctcggattacgtatcgcttcttcgactactacccaccgacgtattcgacatctctctcttcctgtcaaactaccgatcgacccgaacctcgaccaatcgacatcgacctcatcgaaatagcctccctcgaaacactacaaggagaaagaaaagagattgaatcgaatttgaaagatggctttgaagaggatcaacaaggtgagtcgccatcgtcgtcgtcgtcggccggtgttttccccggttttcggagtttggttttgcgaggtccggttcgtccgtttcgtggttgggggaatttgagctgggtcaagggtcgaggtcggggtcttacggatcctggaccaccccggggctttgagggtgtgttggggaggtgtcagttggaatgacctgagagaagctcgacgggacgacacgaggcgagccgagccgagcttgggcagggaaagaatggacgcgtcttgttcgtcgaaacgagtcgttcgagggcgacatgacggatgacggattggcatgtcgggtgggatgatcatcaggcgcgcacgtacggcgtcgatgatgacgagcgagcgttcgtcgtcgtccttttctcgaaaagtacgaacgcgatcaatcggctgtccatcttgcacgctctccatccggaccatctctcggtctacctcctgcactgtcgcatgcaccagactcggacatccttaccctgctcgtcctggacatcttactcgctagacaccgaactttaagctgacaacgcacgcccgctctttttccccctcatcgcgttgactcgtttaggaattgaccgatcttggacgagacccaccgtcgtcctgctcggccgggccgatcggggacagcttgttcaactggcaagctaccatcatgggtcccgtgagtctcgccatcggccccgtcacgcctaggagacaaagaggctgatcgtgttttggcaaactcgactgggcgatctcgatcttgcatctggggatatgacggatggatcggttctacatttcgcggcggccgatatagggtgattcgccttacgccggtggtgtctttttcctcaacctttccttccctaccggtgagtcatcgactgcggcataatctcgccaacagctggacgtgcatgactgattcgaacggtcccactgcagactaccccttcaagccccccaaggtcagcttcaccacccgaatctaccaccccaacatcaactcgaacggttcgatctgtctggatatcttgagggatcagtggagtccggccttgaccatcagcaagggtgagaactctcggtcgcacgtgggcctgataagaggctgacgatgatgggatttgtagtgttgttgtcgatctgttcgatgttgaccgaccccaacccggacgacccgctcgtccccgagattgcgcacgtgagtcctcccacccgcccgctaggtttggccctacaatcgcccttgtctaacgaaatcgagctttctcttccaaccgacagacctacaagactgaccgagcacgatacgagtccactgccagggagtggaccagaaagtgagtctcgctcgccctttcgcccagttccgacgtaggatgtgctcgctgacgggatttcgctcgcacccgtctccataggtacgccatgtaaatacacaagacgacgtgatgacccaagatttcccccacccacccctctgatcacatccccgcgtacgtttgaccgccccgaaacccttgcggcctcacccgaccccgcggccttgcgacaacttgggctttgaacccaatccgccacccgggtcgtccggtcatggcatgctagtcgaacgttctcgcgattgttctagataatgccacgattcataacaggcaacaaagtctgttcgctctgtacgttgcacgttccacgtcactcacgtttgagagatcaacaaacactcggttcttgctcgatttctccgtgaaacgtttgcctcttagcgaaaccccttacccctctctagaaacgtcctcggtcgtgactcgctcgtgtaacgctattattgttttgcaaacctctcgcttgccgatccatccgcgttcactctaccctcatcacatcgggtcccgactccacccctcgcctgtgtacgatcacaccctagcgatagtgcgagactagcaaaacgggtccgtccatgtccacgcaaaggtagcgcttggacgttcccgttcgatcatcgagagggtttgcgaggacggtcgagatccagatcacgatgatgatggatggtaccgtatgggggaagtcatcatcgcatactatcacatcgggacaggtaggatctctggcagcggggtggtcccggtcagagagaagaaaaaaacacgatcgagtttcatttccgggcactggaatcccgtcaccttctgcgcactagcagagatgggtacgttacacctcgcagctgatcgcgcgcgcgatgagggacagacgattccagctcgatggtaaaagacgttcttcttcagtctgaacagatccaatggccaatgacgagatgagatctgatgatgaagcagcgatctgagagctgacgagaacagaccgatggaagttggagctatggtgagcagccccgcatgtggtgcgacgatcgaatcagacgtgcaatggaagcgggatcgtgacaggggaggtcgagtggaccatccttgacccgactctggacaagaatcgaagtagttggtatgacgttcatggaagtgactccgctggtcatactcccaagctcgacctccctgctgacgtccgcctcccctgtggttggcaaacctgtgatcatcgttgaccacagtagggtctgcctggcatttgggacagatctggctcgcaaacaataaagacgccgagacttaggagggttgaacttcatcgatatcgtctaccttgccgtccacctgtacttgcaaagtcgccaaattgaggaacaattcgcgcttttcatcggccatctcggcctgagtcgtgtaaagactctgcggcgattcggcgacacgagcaatctcggcttcgatcgcgacgtcttgggcaacctcctcgtggtcctcgctatcctcatctatcgagggttcggtggcggacaattcgaggtcgtcggatccagcatgagtctggctccaggatgcgaccgcatccgctttgattgacgcgttgattcggtcggacatctcacgctcctcctgcgcaagagcggcaggaagacccgataggctcgcacccttttcaaacctttgcttgatctccgacgtgagatccaggtctttcttctgctgcgccgtggcccagttctcgcgagattcggcgacccgccgtctgtgaatacccatcttgagagcttgtcgcatcgagaggaggttctgaacaatctcctcatcccgccagggcgtgcagctctcctcgtccaacttgaaagcttcgtgggtcatccaggcgttggatcccgctttctgacaagcttcgaggatgtcgatgttgcgaacgacagtctgcaggtgtggatcggcccttacgagagcagcgatcgatttttgtggctgcccaggtttagagaacaccccgaggtagggctggatgacatctggcaggtcttcgctggtcttggactcttcctccagcatctgcgaggctaaatcgaggtacgaggtcctctgatcgtagatatcgtggatggctctgccccctgcctgatgacccatgaggcgtcgcgccagctctggtccgagcttttggatcaaaaccatagcccttctcgaccttttagaccagttcgtctcgcgatcgcaacgtcaatcatgtctcgatcgatcggattcatttgtacatctaagtaacaatctagctaagcagacgatctgaggatactctttcggtttgtacatgtatagatgtcggagtgtggaatgcgttgagcgagaaccgagaagggaggtgtgtaccggggaaaaaaagggccttgcctttggcgtgacgaagcgatactgcctcgtgcgcccatagtgtacggcgagcggtgcgctcactgagatctttgcgtcgtcgtgacgatggcggcatccgagtcgaggttgataaggtccggccgttgttgctgctgctgcgcgccatgcgaaacgtcagtctcggaccgcgtgattggggtcccactgagcgggctgctttcggcgggttgggcgagcaggccgttatatgaaacgtgacctggaccggaaggtgctccagattgtggtgccggtaccgcgcccatgtttcgcatcgacgaggccgaggaagacgtgttggaagcaggacgaggctggatgaacccgccggacgggtcgatcgacgactaatggagggatcgtgtttcagcacccacgtcccgttttgttgtcgaatgaaacctgtccacgatccgactcacctctcccaccgagccttgctgttgctcagcctttttcctcgcttcggcctccctcttttgctgttcctcgtgctcgagcatgctcaaccgcatggcctccatcaacatcatctcctcgagatcgttcacgccatccctgtccgcacgtctgctcgacctcctgccaccggaacctgcgccgaggttactggtcacgctcccactacgagctcctcgaaccccggccccgcccgcagccgacatgaactgttgaaacgcttcctgcgtcatttcagtcgtgatcggacccgtctccgtgcccgggaccgacgtcctcgaggacgtgtatccgacgggaatcaacctgtccccgacctgttccgagcgagcgcaacgacaggaaaggtcagcccgtccgtccagtccctcgaacccgggatcggaccccgctctgctgacataccctatgcatgatgatcctcctactcgccctcctcgccgcctgcgccttgacggcgttcaacttgtcttcccagtccggtctgatctgatcgatcgtgacgaccgccttggatttggacgacacgctcttcctcctcggggtctgtccgtccgctcgggggtcgacgacgttgtctgttgacgaaggcgaagtggccaagagcgtctctggacgagcgatctgagcgtgggtcgtcgggatcgaaatccaactcatggtcagcgcttggtcccccaagcgtcataccgcaacactcatgcgcccccagatggactcaccttttgaacctcgtagatgacaccgaaatccgtctccatgcaataaggacacgccgccggttcgctctccagatgcgtgatcgtcgcttcggcccgtttgatctggacgaaacattccgtacagatgggttgttcacagcatcgcgaggtgttgatattgggcgggtagtactgagagcacaaagttggagtcgacgagtttgcggatcgtcagggatttcgaacgacgacggcgacgacgacgagtccacctcgccgccccgaacgggccacccggtaggactcaccaagaaacagatgggacactcgacggcgccattgtacgccctggcttctttcctctccctttctgcggaccgttctttctcctctttcctctccttgccaccgacggcgatcttcaagcctttccttatcgaccccgccgcactcgcgcctaccgatgtcgaggtcgaccccgaacctgaaccgacggccgacgtcatcgacatccccgggagggtcatgttcgtccccgccgcattggccaactcgtccgcggcctcttgttccgcctgtaaagcctgtgcctgtctgacctctttcaacccacccacaacctgctcgtccgtccaatcctcttcgtaatcctccaacccgcggtagaacggggcgagcttcttttcgattatcagccccttgacgaccgggtgggaataatcttgggcggcaggacgaagagagtagagaccctgaggatggagatgacccccgtcgaccagacctggaggcgtcggtgggctaggcagggagacagagttggatttggaacgaccgatggtggacgaggtcgaccccgatcgatcccgaccgcctccaaagagggaagagacccccccggcgaggggtcgcgaggaagagggagaggagattgaactgttgttgatattgccccccgggccgaattgagatgaagaagagggtccgccgtcgagatggttgggtgagacttggccagggctcgacctcccgggtgatgaaggggtgcccccggtggatgattgttggttgcccatggtcgctcgtcgtgggatgtaggcaaggagaggtggtgaagctagacctggagggcgatggatgatgtgtatgtcacgacggtcgatagccttcctttgactgtcaccgggaatgacgctataatgggggtggtgtcgaccgatatgacgtccaaccgagtcacagggtggactctttgtctagatccagataggtcgtcaaagggatggtctctgtccgtctcgacgatgttcagtgacagaggtcgtcgggcggatgtgatgtcacgagaccacttacgggaaacgttgcagttgattatgatcgcacttccgtaaagagctgacaaaacgggcgtgtgacccggtcgaatgccagtgtggtaggagtgtctacgcgggcgtgtgacgaccgtgaccgtgacaatacggttcgtttagacagacgcgcaagtttgtgatcgcagcaagtaattcgaggtttaaaattgtgaggaatgtaggtgtgatatgatgatatggtcgaaaagttgggatctcggccggggaccttgcttgaatcagatgaacggccatggacttttgcggtgaacggcatatgacaacgatcggcaccttggacaccttcgacctactctgctctgctctgcgttctcggcctccccgattacgcggacgcggaggcagaaagggggggagagggaacagacaacggctgacgcaatgacacacacacacacacacacacaactcactactcgcacactcctctactctggtctacggggtctgccggaatctcggcaacccccgtcattcaaattccagtcacagctcccggccgttcacacctttatcgttcttcggcaatcaaatgcagatcgagtcatcgcgaccgtccaagtaaagtagtagtacaccaccaactgccgcaattactcgccaaactaacgccaacaaccatttcatctcatcgatcgcgcgcgcgcgaaagagagtatagctagtatagtagtcgtaaagaggcagcagccaagggggccaaaggggaaaaaagacgctaacgaaacccgaataaaggatcgggccccgtccggctatcacccacctaccacacccagccagatcgatccctagctaaatcgtcgacactcgcatgaaacgtcctatcctagatctctatgcatatcccatgacgatcataccccccggacccctccccccccgtctacttggtccgcttgtatacctttttcaaaaactcttcaaacacctccttcttcatcccactcgcctcctcgtccacgctctcgatcagtcccatgatacgctcgtaactctccttttcatacgaggcgaacttggtcgggatgtcaatgttgctcgaggaaaagatcgacttgacgacttgttcggacgaggacgatttacgaccatagtgttcctgcaaatgcggggggggggggggctagtcgaggtggataggcgaacggaccgatagaccagtcccgatgcgtgcttgtgtaaagttgatcagattgcttacgagcctgtcttctgaaatcagacgtcttgactcgggattgtctgacaggtgaacgaaatcagcgaacaaaaaaacacgccttcgatacatgccccccttgaaacgcaacgtcatacacattatcgtacacgcggcaaagcacgaagctcgatcgtccgtttcacccttgtatgattccatcttattgatcgctggcgctggattggggggacgacctgtttccacgatggtcatcaaatgatggggatcacgagggggtcgacgaggagtcgcagggaaggggaggtccgtggcctggtttaaatgaaaagcgggtctcgacgcgtttggacgcgcgcgcgaccagtcagggaggagggagagggggggcaggagggagagctaggtacatgggtgagtgggtggaggagcagggagagggcgggtcgagcgagcgagcgtcaacctctagttccagtagccagtagactgtgtacttgaatcgcatcgatccattcagctaggtggtagtacactcgacaccaccatcagcagtacatcctatcgtcatcctccatccatccctaccttgctctgctatccaaaacaggcagcagcagacgactcggcaaagaggaccgttcactgaacatcgtgaaccagagggagaatctctacccataccccacctcgtcctctcttgtccaccttccaagaactcttcccgtcgctctttccttccatctccactactctctcgctcatcctcacacgatcgatctggcttgccacaccgggatcaagttagagtgtcctcccaatcatcgcaagagaatcataagcaggcgactattcccagacaaagcaaagcttctagacctccccccgccataccacagctcgtagctcgctacgcaccaaccactcgcgagctcccatcatctccgggccagacgattcatcaaggagcgggaatagactgtgagtaccgataagtccccattcgttcccccttctctcggacaatggcacctatgcggtcatcgagaggtcgcgaacggttcttggacgttcctgcacgtccagcgtgatcgtgacgagcgtattcggcgacactgccagaaaatcactgcgaggagatagtccgctgacatggcattccattttgtatttggtcatgacagctccttcaacacagagcttgataagtttgacctgtatttcagtgttcaaatcggagcttgagaggacgacacgcaccgcgacaaggggagaccatctttcgcttactcgcacgacctgccacgacgaaatcgaagcacaaggtacccctcgatcaatctccgtgatcgatcggtatggcgcccacgacccgatctgcggctacggcttgtgaggccgaagggcatggcgagctggatcatgtctgtcaatactcggacgaacaggagcatcaccaccaacatgagcatgagcagcaacagcagcaacaacagtggcttcaggagggagagatcgaacaccaccagcatcaggatgaaccgggcgtatccacgaggttacgtttgagacgggccgagcaggaggaagataccatccacgtccaggtccccgtgctcgctaccgccggaccgtcttcccagcgagatcaacccgcacacgtctttgcatcctcgtcctctacctctgggtgtgcctcggcctcgacgacaccagcatgtggaaaatcggacaagaagggcagaccgatcaagctcggcggtccgggcaaggagaacgtacccccgctcgtcctcaacgggcacgtcttgctcgggatcgatgggagtgacgatgagcgcgatctcgacgaggacgaggacgagttgaacctccgcccgagtacaccgagcacgagtcgacggcgtgatccccattctcagcagcagcagcttcaacagcatcatcgtgggacttccgcctctgggatgagcgtcgatgtggactcttgttcctcgcccgtcacgatgcatacgagtcggacaggaaaggagcccgagttccaacccggtgcttcaggaccaaccacccccggaaggaaaccggtcctcagaaagtcacgtacgatggggtcgctatccggcggtctcgccaggtcgaggtcggacgtttccgggatcaagacgaggtcgggtaaagtcgcagggacaacgacggattgtgattcggggatggacgtcgatggcaacgatgaggacgtgtttgagatgaccgacaaggaggaggaagacgcggatgaggacgaaggggtcgtcctggccgtcatcaaatcagtgccggaagaggacgaagatgcgaaacgacgcaaaagaaggcggaccgagggtggtgcgacctcgactgcttcgggtcgaccggtctcgggcttgatcagtgccaccaacttgcaagctgtccctgaaggggggttgagtttgcccggaccgaccgggaaccctagcagctcggctcgatccaggttcacgtcaagcgggatgaggacgaggtcagggacgaccatcataccccgtacggggagagcccggacaggtgcagacacgccatccgcagcttccacctcgtccggatcgaccaacaactcgggaagcttgaacgccgcgtcctctcgcttgggaagaccgaggactctctcacagagctcgagtcattcgagcttgaacggcgtcatgatgcaggtcgctgcagcgtctggatcgggagggaatggagtgggtagtaacaataacaacaacaacggctcggcaggcggtagtagcaacacgactcctgggagactctctcgaagtgtcagttatgcatacgggttcgccacctcgagtgaagcgaacacccaatcttccggtcagcgcggacaacagtcgggcgagaggcggacgttgaggcggagtgacagttcgaggtcaagtatgagcttgaagcgcaaggaccgcgagatgagcgtcagcagcatgatcagtgtgaggagcgaaaacatgtcgggtaagtcgcgagcatggccgcttgctatgattcggattgcgtttgctcaattgccgtctgtcatcagttccccccgtatcgtcatcgtccatggcgtcatcttcgttctcctttttcgcgcccgcccaaacgtcttcatcgacctcgagcatctcggatccattcgcctcggcctttggctcgctcacaggggagaaacgtcgagtaacgccggatatggacatcgacgttgacgccgactcgggcgagagctcgatcagcggaggcaagcagtcgaaccgtctattgttcccttcgacgccctcgaccagaaaggcccccgcttctcctcgaaggagtagcagaaaacctcgttcaaccgcgaccgatgatatacccacctcgtcaccccatgctgccaggctgttctcgccgagccgagctactacgcctgtgcatcaggtcgacccagaagctactgccaccgatatcaacgtgactcctcgtcgagctcgacgactgcaagctcagcgttcggagcgtgatggttcttgcacccccacgagaacacccggcatgtcgatcagcgacgatatctcgccctcggcgtcacaggagagcgaacagatcatcacccctaagatttcccgcatcgtctccaagttgacgctcgatcaaaaactacaacaggtggcgaaccagcgacaagaggatcaagacgaggggtctgccgaagatgacggggtggtcgtgggtggacccgccttgaacccttacaaggtactcaagatggcgctcaggtgttcgtcagctggagtcaacgctggcaatgtcattgtcggccgggaggacgagaaggccgccgtgggcgtgtacctcgaaagcggcagaatcgacgggaccgcaggcgcaccccgctcgttgtacatctcgggggcacctggtaccggcaagaccgccctagtgacgtccatatccaacgaattgcgggaggaaggctggaacattgcgtttgtcaactgcatgggcatggctggaggacgcaaggaagacgtctggaacaggatcgtcatgacctggggactggacggcaagggagagcgggcgctcgagacgggcctgcgagcggcccctgcttctgaaagacggtgagcgctgacagggccccaatttcagctacgcgtctgagcttaccataccactcgcacagccttctcattcttgacgaggtcgacgcgctcctctcatccacctcgtctgccaatgcaaacaacaccctccgcaacctgttcacccttccttctacccatacccagactaccgtccgagtcattgccatttccaactcgctcgacttgacggcccgtcggtccatctcttccgccttggccgaactctcgcccgacaacctgtcttttactgcttacgggtccaaggagatgattgccatcgtcaaatctcggattgctgccgtcaaggccgatgcggttcgggacgggcgagactcggtcgaaatcgacgaaaaggcgatcgagctcgtggggcgcaaggtcgaggtcagcaacggtgatttgagaatgtgcctgaatgtcatggtcgaggccgtgggcacggccgaggcggattggaaacgcaaatcgaccgctgccaacaacgtcaacacgccgaaaggctcgacctcgacgggtagttacctcgaacccgtcatccctcctaccaaggttgcgctgcaccacgtgctaaaggccttgaccagctcgatcgcgaaactcaaagccaacgtcgctagctcgtccccctctagcggaagctcgggggcgctggataccaaggtccgatcgttgaatgtccaggtcaagagcatcctgcttgccctcctcgtggcccgtcagcgagtccgactcggcctgcgtcctgcacacgtttctgcccaatctgcttcatacggtaccggcaactcgtctggccacggcgggagtggtagccatcatgccaacgcgatcgtcaatcccgatcgaatcacgctcgagctcctcttgccgacctatacctacttgctcgggcacgcctcgagctcgttgtcccccgtgggtcaaaccgatttcatggacctcctcatgcaagccgaagtcatcgggctcgtctcgctcggttcatcttcctgtccgttgaccccgaccaagactccatcccgccggggcaacaaacggtccgggtcgggtaaagatcggacggtcgagttgatggtcaaggatgaagacctggtgcgatctctcggcttggctgcctcgacgacagcgacgccaggggcagatgggggaaaagcgcccgttctcggtgtcatggatagcgagatgaggtcaatgtggacgagagaggagacgaggtggaaaaaggccatggagggcaagacgaggcaggcagagactgcggaacgaaacgcagctcgaggtcagctcgggttcgacgaggtctgaatcggatggtccatacaatcgagatctgccgatccggcgcttttctgggctagattgtcatatttttctcttttctcctcctgacaccattcttgtatcgttccttctttttcgccctcggaaactgtagcatttcgcatcatctcgatcatgttcaatgtcgtcccgtatcgctgctcacttcttccgcagtctgatggacttgtcgatcgatcggaaagagggtggccaatgatggctcggacagggacgctccgggctagaatctacctgaaccgaaaagcacaaacaacactcgattagcctccgaactgtcccttatacacatctccgagcccacgagactagcgctcaactcgtatgccgtcttctgcttgaaaaaaaaaaaaatctgacaaagaaatatcactagattatttcgatgttgatgtgggagggagacgggtgggtcggttatcctctccatgtcagtacgaggtggaaagccgatcgattccacccgcccgagactcacctcttgctgagtggatcccttggtgatgaggtatcggttcctcaggtcgttgatgtcgatgttatgagtgaacgctccatcgtacaagtccttcttctcttccttgacagcggtcaccggggatccagctccgtgtagagaagcgatccttgcggcgacggcggctgggacgagatacgacgatgatcagaagggttcgtagatcaggtagagtcagctctaagaacgttgacgataggaagtctcgttcgaacctagagacacttgcctgcttgtgcggccgcgtcgagggtgggcttttcctcgggttcatcgtcccacttgcgttttctctccgtgtcggccatatctctgtgtgttctagtctatcttgcaggtcgattacactagtgtagaggtatcctgtaggttcaatatcggtttagaaagggtcaagtcgacattattacatggtctaggtcgactgaaggtgaaggtgatttgagctgagattcgagggaaaccaacaaaataaagtagaacaagctcagttacaactagcaactagctctactactatagcctctacacacctctcgtctcttcactttcaacagcttgaacaactaccgattcatcatcgtcatcgtctttggatagttcaacccgtcaacaatgtcgacacccatcttgtcgacgcatcgatcgctcgccgtcctcgcccgacgtcagctaaccgcatcatctcggaccgtccatcactcgcgaacatccatcaacgattctaaaaatgacggccccgtacgacaagacgaaaagtgagcccgagggttcgatcgggatggtccgttccatccgcaagtctggctcatacccgattgaatcccggtctataggcccaagcaggaacgactggaagacatctttgccgacctcttcgatgaaaccccgctcccctctctaaggtgagcctgtctctcgaccggtaccttcgtcatagagacgccgggacacatgactaacacgatctcgacacagaccgcctccttcggagactaacatccgccctccacatgaagctggcgaggtggtaccttcttggatccagaacagtccatcggtcgagactccccgtcggtcttcgtcgtcatccggttggacagaagatcagggaccttcctcgactccccgacagacccgatcacgacctccttcctctgggacgcaggagagacgacccgaacgtcggccgaggttcggtatgaggcagaacgacgagcccggtcgatcgacggataggtcgaggatgactctcaaggagaccaaggctttcaacgagatcctagggaacatgtacgaggatcacaccgcctcgaagaagaactcggccccgtcgacttcccagtccgacatacccgtccgacccatctcggcgagattgggttacctcgacccggaagatcgttcgacgtcgactcacgatcgacctacgtcggagcgaacgcccagacccgtcaggccgaccatgccggctcatgaaattgggcaagagacgtacgacgagtttgatcggcaaaaggagatcatctccgggttgggatccgacctcgaagtctgggcgtgggtgagggagaatgtctttcggacgacccctcgggacgtcggtccgggggaggatgatgccgatcgtcagccattcccctcgtcctactcgctcgtcctcgcctacctgatcaaggtcttccgggaagaactcaagaaccctcatctggcgctctcgacgttcaccctcgcgcgatcacattcgatccagtcttacgtagcgggatgctccaccgcggcttacaacgaagccatggagacgtattggaaatcgttccgcaacttgcgacgggtcgaagaatgcgtcaaggagatgagcgtcaacggggtcgggtgggatcggaataccagcaagatcctctcgagcatcatcgagagcctgagcgagacgcaattgtcctcgcccgcagcacagtttggagcggggcagaggagattagaggcagagtttgggaccgaggtgttgatccggctgggcgcactggagaaacgcgtagaggccgacgtcaagagcaaggaaaagggggtgaggatgttgctaggacagttggcggcggaaaagagacgtagagaggcggcgagtcggccggcggaccttccacccgtacaggatgaaccgaggtgggaagacgagagggacgacgaggtttgggagtcgggtcgcggacgggacgatcggcggtcgtatgggagaagggaccagtggacagagtctgcaacgtctagacaggacgggccgagacaacaatcttcccgcccgagttggcgatgaaggtgttgttacgagagaagggcttgtacctttcccacgcaccccatgtagctcctttaccttgcatatacatatattgagagaaaacaacaaggtctccggcgccctcggacgcatgttctcagtccatccgcctctctggattttccctgggtcgcctttttcgagcatgtagtggccattagggtttgcggccagtcccaaggacagtcagtctgatatgcactggccgtggctttgtccagagttgtcgaggccaaggtcggcttcacgtaggacgacacatccacggtggaattgctcagaaacccttgggatgccgaattttttgccacctggtcggccgaacaagaatacaaggatgtgtacgaacgcccaaagatcggatccgcggcctcgttgcgaaacatcttcgcgtggaccctaatccatcaagaatagcctgatcacccgactcggcttcaacagcggcctcttgatgttccgtttggagttgagatccgactgggaacgcaagaccagggtgtggttgaggccaagaaatcttgggtaggaagattctgggttggtggtggtgctgaaaaagtacaggtggaaaggcatgtgccttgtgttcggggtccagctccactgaccggatgaaaagctcgtcggctggattcccgtggcgatgcatctattagaacggcatatcatgtaatgccatatgaacgacttctcgtacatcgcgagcacaagaccgtcaaaatcttggctgatcgtccgggacttttcctgtccagatattcaggtgatccgggtgacgagtggaaacactaatcggcagcacgagcaacgtgttctttcgagcgttaggcaagctcgtaacgatacgcacacccttgcccttgtacacgctgttcgtcatggttatcgccgctattgtcattggtttgtatcgctcaacgatttgtgggaagacgaaagtgtcccggttccacacccaccagaagcgttagtctcgctgacctagacgcagggacgagtttccccgatcgaggtccgtgcgcgcggaacaagaaaagggggattcgcgtttcagccatcggcgagcgacaaatggaagcgaacccggcgttgttttttgtttagctcaataatgtaacatggcgacaagcgaagaaactttgatcaaccgtcgttggaccatcgtagtgacgacaacgttacggagacgacgaccgggataatccacggaatgagatcgcggagatgatcactcggcacccccgcaatcggaacaaggtgggtcttgcgtcgagaagatttttttggcaggaaccgtcatagataccttttgcgaacgtgaccataacaaacgatcgatcggagcggtacgagaagcttctcaggtgccccacaaatacaagtatggtataacaatcaacgatatcaggagccctgatttcaacttgatgggatatacccaggcaccacgatcacacagtactccaaccgacattcgagcattcccagaccgcagattcgcattgacaaacacctaccaactcctcaaacatcgccgttctaacggttcgagaatcatcagcatggctcaaagcggcaactccacccccgtatcttccctctcgtgctctgcgatcctcgaaaacttggagcgtaatggcctgtacctcgggcttgatcagcatggtggtctgatgaactcgggtgtacgtttctcacagacaagcctactgccttctcactgaacgtcaggctgactctggattccatgaggacgtatcggtagagactcggtctggaagaagactttcgccttcatctgaccgaatggttccacgcccgcgcccggatcgactcggaagtcttccccgtcgataccattcaggaagagcagatcagggtcaaggtggatgcgctggcaaaaaagtttgatttcacgatgaggtgcaaggacgatgatagagagtcgatgttgagggatatgctggacttggcgaggatgatgtcggtcagtgttgaatgacgacaaagacgagtagggtgagttttgtcctttggtctgtatttgatagtacagccgtatgatatgaggagtaattcgtatctttatcagatcgtgcccagcctctggatcgacaaaccccttcaaaatgtctcttcctatacgtcacaacgcttccaataacgccattcacgatctcgctctggtcaatcactacgctcctgattagtgcatgactgtgatcagacgtctcgtttctccatctctctgaccttgtacgacagcccttgtatcatcacgtccctatgcatgaccgatcatctgcgggcctcggccggcgactctttcgtacaggcggattcaagtttgatggttatggtgccttccactcgagcaaacgccgagacctttagcagttaaagtgtactcgtgctcggacgataagcggtctcgaaatgagaagctgcttgaaagttcttgataaacttcccgcgaggcgcgtctggaggttttcgaatgatctatacacatctcgtcagccatcaatcatcccgctgccataacgactttacctcagcctctggtcctatttcacgatgagagacccctttctgtcttcatctttgggtcgatttgctgtttcaaattcgatcttctcgctggcaacactctcagactatcgctttctgttgtaccggcgcccgaaactcccgatgtgtgtgaacccaagccgtggaatgtggtctagcgtagcaggctcaagcagaggtatgtatggcgggcgatttcgcggtacgactgttgtgccaaacggtctggcaggcgcgctttcggtcgaagaacctagtcttctataacatctcggcatcatcaattcgcacgccgggattcggtcggtcgatcaacctttcgttccgtctctcgaccatcttcctagtcgagtcgaaatacatcaccgtccgttgggtcacaggatcgagatttcctctcagcgtctctccgagtactgctattctgggatttgccccttcaatgtgatcatcgcctcctacgtccctggccatgccctcgctcggcagaccttcattgttcacccaggtcctacatctcgatcgggttttccctgcattgatattccgaagagaccatgcttagacgtcggtggtatgactgtcttatcagccgactggtatgggcaagacgaggatggccaagctcggccgcccaatacggtcgaacggtaccgacagtcaacatgcagatctttgatcccgagcaagtcgcccagctctcccccccccccttacaccgccacctgcccccaaaggggtatctcggatgctgcatactatcgtgatatcgatggctccggcaaatgattaccgttcgtttcagtacaagttcaggctcggctcggtcacaaggaggatagcagtctttccgtccgtgtgagcgtccctcacaggtggtccacattcgacccccgtttctcctcgcaattccgagccatgtcccccctcccctcccaacccctcgtcaccaactcgcctacgacacacctgcactacctcaccggtcgtcgaaacctcttgtccctgcacatcatcctcaacctcttgccccgtcacaatctcgtccagctcgtacaagactatgtgtgggccctgatcgaccccgtgagagaggtcggggatgaattggtactggatttcaccttgggggaaagaggcaaggggcaggtgggagaaggggtcggcgtatgggggatcgtagggaagagtggggtgttgaccaagatcaggaaggaacgatgggatgtggtcagtatccggcacggcgtcccccacctcacccccacttccgcttcctctcctctgtcgatagtaccgtggtgttgtgtttactgaccgactcttgggaccatgtagaccttttgcaagacggtagaccacccccagatccccaagacccacatgctcctcaccgaatccagcgaatcgaccgagtacctccttcaggcggccaacactggattgatcgacgttttgaagaacgagatcaccgcggggttgttgaagagtctgatcgtgagtagttcgacgagatagacgggccggcggtcggtcggttctcagggcagggtcgacgtcggatagctaacatctcttcgtcttcactaatgccgctcgtcgcagatcacggatcaacccgctcaacgacccactcgtggccccctgcccgactctgcgcgttcaaggcacctgatcatcaccctcaacttgcccccctcgggcaggtcggaagaatctatgccctgggttcaggtcgggttgaacttgtgtgacctgatgggcaaggtcgccctcaagcccgaggtgagtcggtcgtcaggtgtcacggcctccaggtcgacttagcgtggggacgctgatgggcgtttcttccgccatcacctcgccatcacgaacagaccacccgcaaactccgcaagactcgtcaagaggtctcggacgaactcgcccgttcgtacgccctcgagcaaaaggaagagaacggggaccccgaggaagacaaaaaggcggccaagcgcaaggaagaggccaagcgacgggccgcgatgagcgacgccgagaggaaaaaggcgagtctcggacgcgtcgcgtgtgcctcgacgagaagaagatgggcgggctgatccatgtcttttttttggttttccttcggggttgtgtgcgtgtggacgattgtatacagctggaagccaaggaacagaagaagcagcagcggaaagcccagatcaagcagctcaagggaggcaagtgagcggatgacctgatcgtcgtcagaggaacgggcagagaggagcataatccggggggaaggggttcgggatggaaaagcccaggcgttgacagctcggacagagaggaaagagggttcgtacaaaggaaacaagatgaaaaacaacagggtgggatggtgagacagcattgtcaaaggttcaggtcgttcagtgtgttaccatatatggcatttgatttcgcatacctcgtgtcgacgataacgcgttagaaagaacaggttgagggcgatgccgtgcatgttggcccacggttctagatgtagtcgtcaaggtgaatgaagtgacatggacgggtcagagatcaaagatgcatcacacaaggacaaaggataggcaatggaaagcgatgtattgaatcaagatcgtagacatcttcactacggggtacaaaagacgtctgccatctagttataaatgtcaatccgttggtttctccgaaatcctcaatgttccataggaacccccagagtcgtcccgaaggacgatcaatggattaggcaaggatatgaaataacggaagcccagtttaaactcgtctgaaaaatctcgtttccccaaaccctcacccccgacgtttccggttctcatccaagccggcaatcctcccatgttaccccgtccggactgaaggagagaccaagactggccttcctattctccatcaaccttgcgggagaagaacaagaagaccgtctgtcgaggtccaccgacggcccggggtcgggaagaggaaagagcgaggacgaaaaggacgcgccaggggagttgagggccgagtactctgagagatttcgatcgacgagggggtctgatcgagggagaggccgtatgaaagctcgtaacccgtcgacaggaattatacgtcaatcgtgttggtgttttgaataaaaaaaccggggacgcttccgatctgtcgaatgatgcgaagcggtcatcagagacgtccacttcgctcgggcccatgagaaagaaagggaagggaggtgtgggcgggaaggatgaggtgagtatggtcaagaaggtttgatcactatatactcgttgtgtcgaggggctggctagcaaagttttgcgtacgcgtcgcccagagtttagtggaacaagatggagaagtcacgtgaaagaggcaagtgacgagacaggtcgagatggttctagcacgatgcgcttagacggtttaacgggtcttgccaaatcacctcgacattattttgacttgactggattgctaaagatacggatgtatgcagaccctttcccttcacagtgatacaggaagcttcgtcccgattgaaattcacgtcttcccgttctggcgagcgcgctgaaacgtgacgctctctcaacgaaccccgacgtctagtgcgagaatgcagcttagatttgtcaactgaagatggaatctgccatagtatgccccaccaaaacacttcgcgatttcgtcgtggtcagcactacactcgccgactatccaggtgtatcgcgcactcgaggacggtggcgtcaaactggagggccacgttccggcagatccattcccggttgagagatagtcgaatctttcatccaatttgatcacagccacggacctgaatataaccagagcggcgtgtacgtatatgcaaataatagtgagcaactgaccaatgcaaggtcttgggtagcgaatgtaagtggagtgtatgttacgtagcgcgaaaaccgaacctgagcgaagcaaggccgatcatcgtctctcgtgatcacgtcgccacaccttcgcgcacgggtagcttcatttctcggggatgatgctccaatggaacgagacattcgttcctgttcgtagaaacttaagttgctggtcagatgccagcgggataatgatcagtttcgaacgattagctgcaattgcgtgtcgagttccagtggattcaaacctcggctaccgtgagcaacatggttcaggtgctagagataggtgaaatatcgtctcattgtgctaggtgagaaatctcttatcaatcgggcgaaacccttgcacacccagcgaatacgccctatcctatgacagtacatgacagttcaggttatgccatctcggacgtcactccgatcgatcgcaagccgcaagccgagccgcgcgggtttcgaagctcgtcgggaatgcaagtcatttgcggtcgtggcgctcttctcgaggcaccagggcacagatggcaactcgaatctgctccaacgatctcatactcgagaggatcaaaacagcgacgacgtctatccgccatcgttttttctatcacgggatctgtacaccgtgccgctgatcgacagctcacgccttcctcaccatccgttttgctcagagcgcgtcgaacgcatttaagtggtatacaagagctagtgccacttgttcgttcaggtgaaatctaccgacgatgtggggaaacaagcccgagcctcttgctattcgctcatcaggataaatgagaaagatcgagctgatccacagttgaatgaacactgcttgtgacgggatcacgggtccgagcgacgtttcgttagaggaaatcatgtatccagcggatattgcgcagcgatcggccaggcaccaggtggtcggtcgttcatggcacaaggatagagagggggtcatcggtacaaccagccgggcgttgttaggttgatggtaccgtccgaagtgttcgctgaattctctctctctgcggcggcagattgtcatcctcacttcgttctcattctcatgagctgacgggccggactggtgaatccatcacggtggtactcggcttgcgatacgcgtacacccgtcctccccgggccagacaccgaaacaagaggaactccccaatccctcagagcttgaagacaagaaaaggccgatgctctatgaaatctgcatcgtctccaattttatacaattacagtgcctggtaacggtacccggcagaagggcgattttcgtctaatcctcgccttcgacgatccagtaggaaggagcgtccaacttcttgtctccctgtatatccacacccggaacgcaagatcagaacacacccctcttggcgggaaacaagggcgaggcgcgccaatgccgaaatggattggccggccgtcgagactcacgttcaagaatccgagcccgacgatgaagaggtattcgagcgtcttgcctccgcacttggcgacgagctctccagcggcagcggcggatccacccgtggcgatcaggtcactatggccggcgaggatggaagttcagtatagggtcgtaaggaagagatgtgggtagggaaaccgtgtcgactgactcgatgacgatgacggtctggccgggcttgatggcgtcggcctggatctcgaattcgtcctgaacgagggtaccacaacggaaattgtcaatctctaaccccactcgtgcaggcgttcattgatcgccgttgttctcccgggctattcgactcacgacaccgtactccttttcgtaactggcgacgtgacactgtcccggcaactttcctctcttcctcacgggcacgaaagccgctcccaacctggcggcgatcatgggtccgaggaggaacccacgggcatcgaggccgacgacgacgtcgaccttgttttcgcacttgggcagggtcttggtgaagaggtggttcatgaaatgggtcatcagtgcctcggtcgcgagggggtctctgaggatgggctgtggtaggccaggaggtcgggcggggatcagtaccggggattccaaaaagagctgtcaatgtggaagagactcacaaagatgtccaaaaaggtgattccctgcatcgtaccgtacaacattatcgatcagccggagcgtccagtatgctgtttgtcgctggctctgcgctcgctcacctctttggggaaaccggggtagacacccaacttgctcttgatgtaatcgacgtcggacattatgaagggcggtactgcagcttggttgactctgatctgcttcgacagcggcaagtcgtggttcgagttggcacttgaatgaatagtcgtcgctatcagacgttggtcatggtcaagtcggttggttggttgctcgcgtttgacagaaattatggaaccgggagcaagaaggagcggaagcaaaaaggagaagaagatagggaaggagaacctcgttcaaccattccatatatacacacactcggtcgtccaagtacactgatacaaaagaaatgtaccactcttcttcttcttctaaaagtccgtcctgttcgtccactcgcccaaacctccggtctgcgctgcgtgttgaccctcgacctcgatcccacccatacgggttaacccgcggacgagggggttccgggtgggcccgggagcgatcgcggtagggtggctggtgggagtgggagagttttttcgacttcgaccgaggatgaggttgtgcgtcccgtcgaacgggatggagagggttgctagagagacgggcagcgcgtggagtcgcccgtcctctttgagcggggtcgtaggtaaaaagggagacgatgacatgacgggcgacgagggtgtttggaatcggttttgagagctaggcaagccctgaaactgaaccctgcgaggtagggtgtacaattcctcgtcgtgctcctcttgctcgggaaggtggacgtccatttccgagcttgggggtggggtaaggatatcccgagcatatcgagcacgagcttgttcctgtaggatgacatgcaccttgttcttgcccgatatctgatagccagacttgcgggcgttgacgtcgagtctctgtttcttcgtggccacgggtctgctggagagactggtgctcgagttttccttgtccgaggtcgattcgcgagctcgtttgtgcgacatggtggtcgttgagccgtgcatggcgagtagttctctgccgtagattcttcggatgtcgggatgggtcttgtttgctgtgtgcgagttggtcgtcgttgagatatgacggtgaacatgtggatggaggggtgtcatcgtcgtcgtgaaacgccatgttgaacgttcaagggacgagagtctcgatcgcgtcgcgtaagagattcagagtgacgtgacgcgtgaggaacgcgtcgagagtcaggtcacgtgactctcgtgaagatcacgtgattgaccccttaccggaaacgcataaacctggagtgcgcgggaatttgcgggattatgcgttctcttcgtgcatccctctgatcggaagcaaaatcaatcgctcaaagcgcgtaacatgaccgtttcagcataatattgagaagcgagaagcaaccctgtaagagcagatcgagcgccagggcggactcgattggtcggattctcgcttctatacattcaaaggagtgataatcataagcacgcatagctcgagttaccggaatacctataaatgcacagcttgatctggtccatccccagctctacttgcccagttgtgcatcctcattcactgacgcctcgattacttatcccatccaactctgttcatacctgcgtatcctttcaaacgtcatgggagcgaatgatgacccaaattcgggtggctgcgagcagtccggctcgatcgatcagccgattcgcccgaagacacctatcgagggccttgtcagcaagttcgatccctggtcttctcgtaagtaaaggcaaaatgctcgaggcccgcagtatgttgaactcaaacggaccaacagcggaaattgaacgcacggaaacattgccggtgaaacgtgccaaatggccgagggtattaattcaaccgccgattaaaaagcttgagtttgaggtagagaggatcctatgcaaagtggttgttccccagcaacccattcgaatgctgagaaagagccgccataaattgacggatagagaccgcgacggtttcgagccgtccaccacagtgccgagtcagcagagcacgagtatagccgacacgaactactggggacacgggtcatcaggcgtcgctccgactggttctccgaggcagagcacgtctgttcatggtgccgactcgaaatacagtaggaccctcacgcaggggggtggatcttcctaggagtggagatgggcaaggacttgtatcaagcgtttcgtgacatctgagtacatagattgatcgttcaagttccgcgacctaatctcattgccacgtcgctctcgttctttacatgatttttcctatggaacacgattacggggaaaccgagtcgacggatgagtgccttgcatgcataaacacgaagctataggtcaggaaatgtaccggccgttccgtcaagaacatttttgagcgcttgatacaatgaggacgagatgagaagcgccgtgttcagtctctccgactcttgaatcccaaggatcttggtgaagaatctcaaatggtctgcgagatggtcgacacgtggccttacaagggaagcgcagcaatgaagacagccgagtgtcaatcgtcaaaggaagcgatgacaccatctgcgaagcaacaactcagtacataaaggcggggaagtcgaagccgttcttgtataaatgccgggtaaagatcggtcgaaacggggacattgctcagcgagtcgacgtgatcccacctgtcgacggatcaagaaagaaaaagttgtcagctccaaagaatcccttacatagtcaatcatgtaaacaacgagaatcctgaaaatagtcagataaatccagcaccagacgggactcaacctagaccagtcaatcagataaatgtgccacgccaggtcgttgcccatccgcagcagggaaacgtgggctcgagcggatttcgggaaggtcagtacgagcgctataccctgacgccaaatcgatcccgttgttgagctttccctccgatcaggttaggcgggcctgtgggcggtaatcgtgaatcggcgatagtcgatgcctacagacatgtcattgtgcgaccgcaagtgaatgagggcggacctgttcggccaaccacagtcggatcgttctcgagtacgatagaagctggagcagacgggtggtggcagaatctccagaacgttccgaacgaacgaatgacgaggaagtctatagtaagtggtgtagctgtgacgatcacaaatatgacgtttgtcaagctgaattacggatgagtacgcagcgatgtccggggcgcttccttttgggcgacaagctgattcaagcgtaggatcatatcagacgagtatcgacggtccctctggcctcgccctctcgcggtagtcggaactagagatgacatcgcctgttctcaatgacgatgtcatgccactcgtggtcgggcatccagctcgttgtatccatcatatcagccgtgtcattgctgagaagggattcgactacgacgcctttcatatcgtcaacgccaggccctgattaacccttgcgccagcatgcgctctggctcaatgtcgagtgcatgctgacgtaggggtgaacgagagcttgacgttgtcgatatggaacgcgtcgtagtcgaatcccttgagcctctctacgtttcgacgagattacatgatcgtcgcgaatcgacattgccatacaacagcgtagacgacggaacgccggtcttttttgactgcgtgatagcttgttgaacaagtttgcgtcttgcgctgaaaccgtcgaccgtttaataaagagctccccgagtccagctcgtagcggacccctccgagatcaagacatcgtcgccgatgtcgaaacagcccgggtgtgcgagccggcttgccgttacgtaccccaaccgaggtgcagggtgaaaccagccgtaccttcatgtatggtaaaccgggcgtctttggtcgtccccgggtcgaaccgagcggctcgtgaatccggtcatgcgagcggaggcgagtgtggaaacgatgttcgcaaacgttcgcggagcggtccgaactgcacgcttcgtccgagtcttgattccgattcggtactccgagctagccatgttctgtgacttgggatgtggtggtaatcgtttggataccgccgagcgcgaggattgatggccatatcggaccgggctcattgaggtgttgccttcgggagcggtatggtggtcgattcgtctgtgagatccatggttcgagatgcgatgaaggatcatgtttgcagaccctgtccaaggacgtcatcgtaacgcatccgccacgcctgtaaatcgtacgatcagcgctccgtctgatatccaccgacgcgcgtacgccgtactcaccacacgtggacaacgcaccccccccccctctacgttgcacaccgctagacctctaccaagaacccctgtactatcaacctctccacatcccctctcctgaccatgtacctactccccttcctaaactccacctgacccatctctgtccagacgaccccgcaatccctgacgacgtggacgtcgacgtacagttctccgggtggttgggagatggacgatccgaggtcgagtgtggataaaaagggggtcttgtaggcgaggacgaggtcgttgtaggagaggaggaaatcgagctcgtgtggggagagtcgggaacggaggtctagggtgttgtctccatgaggcgtcgtggttgtcggtccggcgccggcaccggtcacattgctgttgttgccgccgggatggtcgagcgagctagcacccctatcgctagctaggagatgagcgaccccacctccggcttcccaatacatgcccttgacgccctctacccttccctgtaggtaagccatcaaacacctcttgttcctccccgccgctaaatgctgtaccgtcaacccgcagacgacccccctattctcttgctgcccgagttgttcacgcgtatagctcgacgtggtcgattggatctgagcgtcgagttgacgggtctctaggcagatttgacggatcagcgggtcggcgtatttggggagggtggatgtctgtgcggatcgacgggattcaaggacgagttggagggcgtcatcgccgtacatggtggtcggtttggaaagtgcctcgacggtgggtgggattgtgttgacgagttcgaggatgacgggcgatgataggttaggttgttcaatcagttgcaagttggttggttcggtgttgatcacatgtgaatccatgtcgatgggaatctcccgggcgacgcgtataacgagactcaggcgaagttcggaagtaaattcatctaagtatgccgtcatcacctttgtattttacttccgacattgcctcgcgtgccccatcgtcgtcgcgtcgtcgacgtcgttgattgggtcgagattacacactgtgctcgccgccaccaaatgcacgggccagaggctagctcgacggtcgatgcccacaagtgaaaccactcgtctcttgagaacgagtgcgtgttttgactgtcccagaagcagacgtacatgatgtacatgagatgttcatgtcgtcatgagatgtgccaccatgtacggccaagtcaatcgacctattgaggctatcattgacccgaaattccctatacgcgactcccccccgcggcggtcggggttgggttccccgcttctgaaaggaagaaacgtgattggatcgtcgtttgacgcgctgaccccggtcgttgagagaggtatgccgtcacacacccgattgtcattacgttattttcacttctcgtcatctccccctcctcctcctcctcctcctcctgccctgcccctgtttcgcccgaaaaaaaactgggctgtttgggcgaaatctcctggctctgacctcggttgcgaccatggacgttggcacgcaaccaccaaccaaccaaccgagtcaccaccaaccaacgacctaccatcccatcccatcctcaccaccatccacacctctcacccggtcactcggtctctcacccgaatccagcacacacgcacacacacacgagactatatcaacccatcaaccaaccacccgaaccaacaacacttcacccctgccccccccccccctccctaaccaactcacctctcggctgtaggttgaagatggtctcgccaagtccccgactcagtggttcggaggcaaggaagaaccttcgcttgccgactggatgatgttgtatccgattcacgcctgcatttccgcccctgacagggtcaaggccgatatcggacccaagacgagagcttggttgaaggcggttcaagccaggtgagtcatagatctcgacactgggttgagcggtccagcaggatgctcataccacgtccgtgtgacgctccaggccggcttaccagaagggactccagcgtcaagaggccgaggaaaaggccagcaagtgaagctcgacggtgtgattctcgagatcgtaacccgaactcacgctcgaggcgttccgtactgccaagcacctttgctcgccgaactacgacgcatcttttctgtcttttttgggagacgttgatttcccctcctccctttcatcgaaaagagggttttctcatatatcaaatcggaccgtcaaatcggaccgtcatcatgagccaaagtgtcattcctgtcattgttatcggatgaaataccgtttcacgtctattctcgtgacgtacaagatcgagcctgtttgtgttttacagttcagtttacaacaggagtcgacaagccatgctaaattctgattgtgatttcccactttatgcgacccagctgcagatacaacaagtcgtacacctatcctgactcacgaggacagatcgctatcgtgctatacccagaaccctccttccccgcaaaccgttcaagatcaacccttgagcacggccgcgtagtccagcccgtcccccgcgcttccaccatggactccagggcggtccccggactgtctcttcctgacctcgtccgcatgacgcaaggccatcagactctcctcgtccataaagatcaactcgtcctctgaatcatcgtcgccgtcgtccccgtccgatccgcctcgctgatgacccgtctcgatccctacccaggcgtcggggtcaggatcaggatggaccatatcccaatcgtccccgtcgtcgatcaaagcatcctcgtcttgcccttccagtcggccggggaaagcgtgctcgtccccgtcctcgtcgtcccgtgatccggacactccctgccgacgtgggatcttggagagagggaggacggggaaatggtcgttcccgggggagacggtcgaggaggtcccatccgaccgggataatcccgggatcgaggacagagatcccgtttccaggctgcgaccatggggtggggatcgggtcatccttgactcggcgtcttcttcctcgggcatgaggacatgatgggatgggttagggatgacatcaaaccccattcggtgagcgataggacctgttcgagccgtccaaagcggaaggtcggaatgtggccataggaacacgttgaatagaagcacacgatgatgatgacaataacgatgctcacctcggggtggtcgaccacgaccttgatgcgcggcgatgagctctcccaacccgacaggccgtctcggggcgaccttgtcctctacctcgtcgtccggtccagggtggaccatcgtatcatcttcatcgatgacgatcccgacatcgcccatcctatccgtctcgaccagagaagccgcgataaagttcaaggtcgtcttcctagggaccagatggccaggtttcaaggccgagctcgaacgactgatcgagctggtggtcatcccctggacacccgtcttcaagctcgaactcgcagaggctggcgagacggatccgctggagggtaccgagttgccgtaaaaggccgggcgggtacgggcgtgacgcagtggtaagggcatgtctcgtggcgagtctttgacggtcgattcgcgattcacagtatcgctgaggtttgatggtgagcgataggagacttgttatatctagcgtctgtgcaccgtttggtatatgatggtgcgattcggcgaacaacggggaaagtgttccaaaccgggtgatgggtgctgataccgaaggggggagggggaatgagattgaaaggatcgcgtcggggcgatgagcgatcaacaaaggcgaagcgaggttgatatgatggatcactgggttgctatcaaagtgacttaggcggctcttggcagtggaccagacatgcttctgcgatgacaatcataagattagagaaggaagacgacgacgaacgtttcagcgtggcgaatccgacgtgagtgaagtgatttgatgtgggtaccacgacgacgacgacgaggaagagtggaatgacgccattgaccgaggttgaaggccaagtcgacggcgacggcgacgacgatcatcccactctcggcctaagccgccaccgccactgccactaccccgagcccgagcccgcatcgcgtcacgtcggtcatcagctgatgggggacggtggcaccgggtagcgcaccgggtacaaaatgaaatgaatacagacagtcaacaacaacaacaatcaacaacaacgcaacaaacgacgacaaccccgataagggaatagcaggggtcaaggaccggggacgatcatcggatcatctcttgcctcctgcacgagcgactgatgcgtccgttaagcgacatcgtccccgtcgttcattccatgactgcgaccgactatcatcaccggaacagacttgtcttacgctgtgtgctgcaccagagctcttgagattcccgcatttttagcgttgcagatgtccatcctagccatgccacaagctgggttgataacattataaattcacattttcaaaagagaaactaggaattcgacagtaacaaacgactcgagcagaggcaagagcgggcggggaaatcaactagactagaaacagcggagggagatagatagatagagacctgacgatgtacagggtagagaacgcgcggatccatgcagagaagatgtcgatcactttcgctcatccaggtcctcggtctcgtcggcggtggtcgtctctacacgaggcgatgcaaagaaaaaacagacgctcgtcagcagccgtctaggtaaaaaaactgattcacgcagcccgaaactgtccatcacgagacacatgcgagccgcacatcgccgcactccgctccccttttcgggcgagatccgagcgttccatgaagctgcaccgcggcaaccttcactctcgtcacaccacacacacacacgccctcgagtctcgtctttttttattcacctgttcacttttcaaacgtctcggtgaacttgctgttcttctccctggtctcgatatcgtccgtctcgctgacgggtgcgggctggacgagtccgtccgtcgagggctcggccgacgagtctacagcagtcgcggaagtagcctcacctgtgccttgagcctgctcgctagcgggagcctgagtgacggtctctccaccgctagtagggtggacgttgacgtcagaagtggcctcgcccataccctcggtcttgggctcgccgaggacaatgttgccgggcaaggtctgcttgccggtggtcgtggactgggagacgacgctctggttggcagagtctcgcgcgggagccttctcctctcgtcggctcaagccagcggcggaagctccgtcgttgctggcgggaacctcggagccggccttgttgtcatcgagcttcttctcgagctgcagaaccaagagcaagtaagcggtcacgcacgacgtggctcttgacagggcgcctactcacagcgtaaccgttggaaccggtctgaacgcccgatccggcggtgggctgagtgtaagcgggagcgaggtcaagggcgggactcgagttggatcccaaggccgaggactgttggtgatggtggtgctcctcgacgtgctcctcctcgtcctcctcctcgacggacgaaccgtcatcgtcctcctcctcttcctcttcctcgtcttccgagcggtatctatgcggcgagcaaaagaaaactcgatggtcagcgagccggatctcccacagcaagctttgcagtcccctgcttacccgacggttcggacggcctgagcgacgggtccgtccctctccatctgctcgctggcgaccaggtacctggcgaccaacatcctgacgtcgttccaccactccatcatctcgtcgtgactcctggccctgaaagtgtaggcagtctcgctcttgcccatcttgaacaagcttccgctgtggctgggggtcttgccgtaagccgaagtaccgtcctttcgtccctcgatgtggaacttgtgcgactgggtagtgttgggcgacgaggggggtccgagggtgcaggcgggcaagaagagcgaccagacggggtgggtggcgtgcgaagggtcagacgaggcgtactcgtgcaagtagcccgagggggtaaggacgtagtatccctccttgtacgacttggtgaatcgcttcttgcgctcgagcagaccgacgtgtacgggctggaccgaagggtcgttcttgccggggtagtcgatcatctacatggttggagcaaaccaggatcgcgtgagcttgacgattcgctgcataccaagacgaacgcgtggacactcacgtcggggttcctcaagggagtctcggggtccaacaagtggtcgcttcgagcggcaaacgagacccactctcggtcagggacgacctgggccatggtgacgcccatgtgcctccaggtctcctggaccgaggtggacatcctagactgccactcgtcgaaagtctgccaagcggactggatcgatcgaacgataccctcctcaaagtgagcagagttttgctgcataatgatgaccgacttttgcaaggcgttctcctcgttgacctgcagagtcgtgcccgaaacctctagtcagcgaccggcttcaggcgagtttcaacgcgtcacgtcgaccagactgacctgcttctggagctgcctgtgaacggccaagttgacggcaaaggggtcctccttggaggaaacgctcatgggagtgttggtaacggcaccgatggccctggcgaggtcggcaatggccttggtggacatctccctctccttggcgacaccagcggcgagcttgccagtgtcgttctggacgttcttgatgtgagccttgatctcggttcggagcttctggaggtgctggacgatcgacgagtcgatggttcgggcgagagaagagtgagactcggcgatgacgcgggtcttgtcacggatggtgtagaagacatcctgtaacgtggggcataagagatggcttgctcgcgtcagtccccggcgccgaagatgatccgcgtcatgcgcgcaagtaggccaggcctgatgtgtctgctcacctggacaccaccttcgcccaagaattggtttccgtgcctaaagggaacctgaatgacggctcccaacttggtcaactccttggaggtgttggcctcgatatcggcgacaccctcaaagtaggctgtcgaacacgcgtcccaaagcggtaatcgcgtcagcaccaggctggggatctaagcgggtactcgagcgatccgggggggggggtaggggggcaggggccggggatgctcacattttggctgatttctatcgatcgataagaaccgaggttagaatgagatgattgatcagcgaggtcgctctagaatttagattgccagagatgatagccatgagaagaggaaggacggtcggtcggtcgggtggactgtcgacgcgtaaggctgtgcagtgcgactctttgccccccccgcatcgtcgtctaccaggccccctgacttccgtgcacgaaactcgcagtcgtctgaaccgctagggttaccagaggaggtaggtgtttgctggtacgacgaccgaggttcaatcaaagtaggtatagctcggcctcttgtactcctcgacctcgcccggatctacggcgtgatcctcctcctcgtcgtcgactggcgataaggtgggagacgtaacggaaggacatgggcaaagactcacaaagttctatgagattaaagaaggagtggattaggtggatggagaaggtcgaacgagagaagatctataaggttcgacgtcgcgggatggggggtacgtcagctccttcccaaagtcgacactcgacggtacgtgaacctgatcgactcacacgttcgagtcgatgattgagtggtacgaatcttctaatagaaagggctgtaggattcggtctggattgatgaatgggatggtcgatcgagttgtatgggatcgatgtgtgtgtgacgaacgacgaggacgacgaggacgtacgtgggtgggtgggtggttgggttgggagatggctcgctggcaaccaccaccacctgaactcacgctagcacgcgcgggccgagtggtggcctgcctgctagctactagtgtgagctgagctgagactcgtagttgaccggctttatcctgctcgacttcgatgacgagttcaaaggggttgacacgcgtcacaaacaaccaatgacgttgcggagacagggcagggggaaggcagaggggatgttaaattgataacagggagctttcgagttcaacctggtatgacgtgtacatatcctgatcactctgtcatcattcgaataaacatgacgtgtgaagctgcataagcgtcagctacgagccatcactcacactgaactgattctgacatcgttgctcgtcgtcttgaaatcaacctgctgcacccaatcgatctcaccccccacccccccgatccagcctgattacccagtagacatctccccgcatctcggagatctgcccaggatgcctctcgaagcatgcatgatcgtgtgagtcctagcctccatcatctggacatgcgctagacgtcacattgaccgatcacgaccttaccttccaaacccgtcagtatcgataactccgagcacatgaggtgagcacctctgccatcaattccgagcatgcccctgacatggacatggacgtgcgacgctgacctcgacgtatcgaccgtgtgtgatggcctcggtatcgataggaatggagattacgcgcctacccggtttcaagctcagaacgacgccgtctcgatggtgttcaactcgaaaaccggcagtaatccggaaaacacctgcggcgtcatgagcatggcaggtcaaagcccacaggtcctggccaccctcacgcaggacctggggaaagtcctctccgccctccaacagaatcatatcggcggtcaggtcgacctcgccacagccctcaatgtcgctcaattggcactcaaacaccgtgagaacaagaatcaacgccagaggatcgtggtctttctcggatccccgctcgtcgacccgttcggcgccggcacgagcagcaactcgaactcgagctccaactcgagcgaagaggcgctggtcaagctcgggaaaaagttgaaaaagaacaacgtggcggtcgacctcgtcttgttcggggacgaagggatggagaatgaacgcgtattgcaaaagtttatcgaggccacgcagaatagcgagaattggtcagtggagtggtccccgcacacgttccctgccgtcgtcgtcgaggctgatgacgaccacgaccacgaccacggacgacctcgttagcaacctcgtcacgatccctcccggacctcatctcctctccgacctcctcgccacctcgcccattctcgctggagagggaggcgcagggatgcccaccgggatggatcaggatgggggagactttggagccggagcgacaggcggggcggatttcggaatcgatccgaacatggaccccgagttggccatggtgagtccccccacaggcccgtgtgagagcgaggacgaggctgaatctcgctcgacggatcgacacgctcatcctcccaggccatccggatgtcactgcaagaggaagaagaacgccaacgaagagaggcggggaacgatgccgggacctcggaccctgctcccgccgcgcccgcccagacgacgacgacggcgaccgaccccctcgccccgtctgaacctgccatgccgacgacgtccgacgaacccactcaagctccacctcacccggccacggggatgccttccaccacgtccggacccatctcggtaccgggtcagctggacgacgtcgatatggaagcacaaggtgcggccggtgccggtgccggtgccgatgacgacgaggacgaggacgaggccatgttgcgggccatcgccatgagtatggagggacaacaagactctacaggcaaggatgacggcgccgacgggaaaaggtagatcaaagcgggggctagggggcgtccgcagcgggacccggtggtgtgggacttaatgacatgttgtgactcgtccttgtttgcatacgatgacatttttacgatcagcaaggagagccttacccccggcttggatggcgaatcgttcgcatagtcacgcccaggccgacagagaaatgtgtgatggtgaacccacctgtgatttccatctcgtctatagaaccgaccacgacttgacctcgcgccatcacactagcttggtcagggtcgatcttgatctcgctgcacatgcacacagaggtgaacgtcagatacaggtcatcctgagctgtcatcccccactcttgagacacgcttatgcaagggcgattcggtaacggccggacgtccctgcccgagccgttctgagaagcaggaccacacaaacacaggcccagctcgaggcgtacgagaccacccgatcggacaactccattcttgggtgacgctcagagaccggccaagtcgacggttgtttcgtatcggtgggacagggaaagaccaagccatcacgtccttgtgacagattgctagtcgcctctaggaacgagttctagtttggctcctaacgaggacgatcgagctgacgggatttcgcaatgaaagctcgggtccggagaggaagcgagtccgcggtgcgccggaagcaacgtatcggtttgaagcgctttttattattacatttttgtaacaagtctgccaaacatctacttcttcgtagcacagtggtagttgcaccgagctgttatagcagtagctatcgaaactcgggggtcgcaggttcgagccctgccgaggaagaagttcctttttgccctctcggtggcgtttctgttttttcccggtgggcaatcgcgccgaatcctgccatgcaacgggttgatactaatctcagcgcccggtattgatcgcgaccgccgctcacagagaacgggtcttggggacgatcacgaggataagaattcgttgaggcatggatccgctcgcggcaatggggtcgcacgcaaaacagctgacggctttctccggaccctgcatcctctcgtcggtgagacaattcaaggaaacacatcttcactcctcgccagcgcccgaggcacgaaatagccagttgaacgcttttgatgcgaattatcgacgaggtttgccacaaacaaccttgatcgagccgcacaatcgatttctacgcgtcacacccgggcagtggcttcgctatcatcgttcaagcatagccctgattaagatcccacgtccagtacaccgctgaacagtatcagtgcgcggagtgtccatgagtaccccgatctaccggcagatctctgctttccttgaacatacccaaattgatcctctgattcacctggatgtgcgtcacatcccctaacgtttcttcgtctatcagccccaacaccctttccctgttcgccatgctgtcctcttcctctatggctttgccacacgcataccggtcagcacgtcgcttgaagaggaagacgtcgcgttctgcgtcacaaaccgtatgaagacgaattcgggggttcgacggatcgtctagcgcccaccatttcgcggggctcagatcgtcgcatttgacgcggggacttgttacaggagttacaggcggtcctctcgaaacgtcgcaacttctcggtcgcccgtgcgatcatatacgaattcataatctgcaaactgtcgttttcaaaaccgcggtcaccgtgtcgttccaatctagatgactctggatcctcaaagtcaaatactctgctcgtctttcagtacccctgcccccccgcatcttcggttcagcactagctggatgcgagtgagccgccaagtctctttttgaggtatgaacaaaatcgaaagaaccacgctctcaggccacgaaagtgaatgctcgccatcgctcggcctgagaatcacctctttgtacgtgcgagagcatgaaccgctgagctatggggctgcgcggaagagaggtatggtccgtggaatgctaggagcccatacgagaaggttagaccgtgcttgccgcatcccagcggatccgacgttttacgttcggcgacactttgtggattctatgcgtgccacccgtctatatggaacagcttgagccaaccgcgccaagtcgctgaatgctgtctgtagagtatcaatttcttccaatgtccttcctgtaggtagaggccgtctctccaaacctttgaggccgtcttcaagcagctctgaggccccccaagggtcttgttcaagcgcttgatttattgcaacaaaacgctcataggccacgcgaggacacggttcacacatggcgttgacgtagcccggggttgtgtccatgcagacgaccacgttcgcaccgcgctgggggactcgagaacggtccgaaagacccttttgggcgagcttcaagacgctacccttacaccccgacgatcgtccctgatttctcacggtccgcgataacgatcctagggggaagagggctggtcttactcgtagcttttttctagtccaacttgcgaggatacctcggagggacgtcaggaagcacgggagaaccgctgaagagcgcagtgaacccgacgaccgaatatattcccaagtcccgaggtcggggatgatcccagcgtcatccttcttccaacccggaattcgccatggagattcgaaagtctgagaaaatcccatttcgagttcgagttcgagcgcgagagcgcccaaccccaccccgaaatccaccgaaaaggcctacttcaccctccccgcctatgccgcaccgcacctctttgtccccgcctacctcgaacccaacttcaagacctgcgccgcggtctacgtcaggcacccgaccgctcgtccggggtatagcgagattccttcgccttacgacgccgatggcgagattatgagcttggcatgggagtggttcaagaagaagggtgagtccagcttcatcgtcgttgtcgtcgcgatcgtatgttttcaagtggctgatattcttgtactttgcctcgaccgtagcacccaacatgaataaacgacgacatcgatggatgagcccagagaggcagacggatcgcaagtaattttcggagtggcatgtcgtccagtactcgcaggccggtgggcaagcaggaccagggagagcaagatgggccgacgggaggcctcgttgtaataccacaaaaaaagggaaaagggctcacgagctgccctttgatcatttcacgacgatccggtcggacggatacacaccagatgcatagatagatacgatccgaaccctcgccctgtgtgtggtcccaagacaagatatgagcgatgtccagcatcattctagccattcggtgatttcctacttttggagagggatcgaatcagtctgctggccaggtgggcggagtctcactttctgccagagatgtcctcgggttcccaatataggcgtgcattccattcaccctgtatgtggtttgccggcccacttgaccaggcttcagaaatcgtattcgacatcggacttgccccccgccattccccgtccgcactcctgagaccttgagcgatgaaggatcctgacgagaacggcggcggcaggcatcgtccaagctgaaagactagcgtcgagtcgaaaacccgatccggtaacgaccactgaccccactgggaacgaatgcaagatcaagggagcggattatggaatgatgtggagaaagcatggaaaatactttcgcttgtacaaatatgtaatggcgcacatggctgcctctctttgaccaatgattacgggtacctacgattcctaatcgtggtttgatgattcctttgcgtctgttcgagacggttctactcggaaacggatcgtcgcctactggggaaagttgctcaactgagcctctccgctgtaaggcacttcgacacaggggaagtcgaggtcggggttgaccaggttggtgcagacgtattgaccctcggtgcggttctacggcgtgtacgcgtctttgttagctcttgcagaaagcgctccccggtcgtccctggacttacggcatacagcccgatgtcaatgttctgagcgacgaacccttcgcattctccggagcatcgcagagaaccgacagtcttgttagggtagttgcctgtaaaacctaggcagtcagccatcatgcgtcccatcacattggtcgtcgtgttcactgaccggaagcgtaaccgttcaagttcaagaacttgatgtccgagatgaccaactccgaggggtggtcttcacaccactgagggttgctgtcgtagttgtaacagctatcatcgggaatcgagacgatcagtatcggatcccgtctgtccgatcctcttgtgaacctacctggtgacaaagataggcttgtcgacgttttccaacgtgaggtcttcccaagtgatgttcctaactcgaccgataccacctccctcaacggattgggtgtcgttgtggccggggaagacctgtagagacgcgtttagcttctcgcagcacgtgttgggcgatccatctctgtttgactcaccttgatcctcgctccgtgctcggtgttgatcagagtgatctattcatgcagagacccataactgtcagcatttcgagaacccccaaggtggctcgcaggacgctggcggtcgactcacgtttcgagcgtaaatgttctcgacgatgtcggtttgaccgtagtactgtccgagcgaaccaacactgattcctgttgatagtcaaaaacatgccccggatcagtctggatgtgacgactcgacgcgacccaagccaacggcacttaccgtgagacccgtcgcagtacaagttctctaccaagatgttggacgagttgggcttgaaggagacgcctggggggatgattgacgagtcaggtcagggatacgtctttttccgggaccatcgcctcttgtccatcgggcgcgacactcacagtcgtctccgttgataatgaccgaatcacggatgatgacattgttggatcggtaagtgtcccctggagcgagcgaaatcgaggtacaggttcagctctgaacgactgggaatcatccgcgacgtcgcgactcacatccatcggtgttggccgcactgttattagagctactgatcgacttgacgaacatgttgctgaattcgactatcgttcccatcaatcatcagccctgtcgttccctattcacccttagtagggacctcggtgcgactcacccttctcgacctggtaggtgatcatgtgccagaaaggagcgttggtgatcgacagcccatcgacccggacgtcgtatgcatcagccacggccagaggaatgggtcgagcaaagagtctcgaggagcctcctgcgacccctcgaccgcctcgagctttctcgacagcataagcgtcccacctgtacacgtgatgatcgctgtcaggaatcacgcctcgggacaaacgagcgcgatcgtcggtgtttcacttaccaagtctgaccggacccatcgatacctccgttccgggtcaaagactggagcgtgatgttctgacccgatagcctccaggcggtggtcgcgttttgatactcgaggtagatcgagttgggggaccagtactcgatgttggggctgcgtgatgcgagctaaacgtcaaaggtctgctggggcgtgtcggcgatcggagggacactcacgtgtactgcatcactccttcgaggttgatgactacattgtgcaactcggtgtccaagaccttgtcgaccgtgtaaagaggtccggggaggttgatgaccgaatccctggcgcaggtctcaaaggccctcaacaaggctggaccatcgtcacgtgctcctccaaggggctacgcagcaagacgaatcgtcgcgttcagcttgagggcgactcgagctggatacgattcgctacgactcacctcgaccgtgcagactccatcggcaaagttgatctgagactcgatctcttccggggtggtctcgttgtatcgagggggcgtggggtgagccaaggctccagaagcgaggagcagagaggtgagggtagcgaggttgagcatgttgacagagagtcgatctggtgattatgagctcgagcttgggcttgcaagtcaagatgtttgaggttggcggaccaggttagattcaggaatctgtcgctctatatatgcgctccaaagtaggctgcactcgagagatctctcgtggtggtaggtggtcgccacgcatacggtaagacgcaccctcacctacctagctagctacctacctacctcgttgcaaaaagttcggggttcgtcctgaatctccgagctaatcgatttcgacctggattcgccgccacctccgctccgggccggggacaagtgtttgcgtggtggcgtcgatcctccacacgcaaaacggccagggcacgaggggcacccggaccgcttcgatcgtagcatcgtgccccccgtggagaaccttgtgacacgatcgtgtagcgaagaccaatgtggcgggcgggtagagtgagacttcagagatctcacagtagactgcaaggtcccacccgaaatcgcactagaggctcgttgaacctctgcatcggtttgccccgggccggtagaaggtcaatcgtctagtagtcggcgcgcgcgcgcgctagtttgcccgcatcattccgtcacacttcttcttcaacctcttgcttgcttcattgcgattcgtctggaaagctctgcttggtatgggcacgaagcacacacacagaggcctccacctgctcgagcatatccacctgcgtattacaaagtgatacatagccaagccaccgataccccggcaggcctttgcgccgccgttcgagcggtccgctttagcctgggccattgggcgtcaggtgaccgaacgacgcgaggacgagcagcaaagttaccccccatatggacgttctcaacgccgaggcgcccggtacgagccgtatctcacagctgcggagaatcctccatgagtcaggttgatgaattactcttggcaaagaggtgttcggatgatcccccccccccccacaggggccggaaccctacgtcattgcgtcgcgaccctttcgatgtcttacccctccgtgatcggcccggtcgatccacgcgtgaagcgattgcgcgagaaagtcagatgaaaccccgacgttgccgacaagcgacaagtcgccgtcgattccgcatcgacatcgagagctacatcgccggtcgatagagagacgttgcgagtcaaagacggatcgctgcgcgagcatgctccgagcgattccgtataccagtgaatcccaggtaatatgatcgaaagcaccggcagtgatgatgctgcgattggcctgggtctactatcacagtcttccccataataatcggcaactgatatgctatgcaagaccgcttcctccaggtgtgctttagcgtgagcatgttcgcctcacctgtgctgcctcggtccttctacatgaccgtgaacacgagcgtgacgacaaagacgaacgtggtaatgtcaatgacgaggcccataatgttccccagagaagcgagctagacgactatcgacaggcgagaccaagtgcggcttgattcacaaacgacgggttgtggggaaaggtcactcagaccgccggtagaggctgtctgtcgccctccaggccagcatctacaagccacgccaggccagccaattgcaagtgccagaaacaaccttgtttcaccgcgccgtaacagcgagtagcctctagtcagataatctgtcattgcgcgacggcatctctccttacgatatgatgtgtattatttgtatgcgactggctttgtgaccttttctggccgacgaccacatcggtcattatcgtctcgatttcgatgttctgtcatttcaattgggttttaggtaatacaatctaagaaaactggctgttgttgctgctcgatcgcccggaaaggtatgctagagacgaccggtgtcgcccctatgccacccctcaccaaatcatcaaccccacctccatcccccagaacctcctgaagcacccacaccgtctcgagcgactacaccgtcaaacccctcttcattatcaacaacagacgacctcgggatcgcaacaggtcgctcaatacaagcaatttgcccaagagcggtccgagcaatcggccgaggcgagacgtgccaaacgagcggatctccctcatgcccctcgctccgttctcgggtccaagtcccagaccggctcgaccgcgtctttgacggcatcgagaccggcgaggtcctacattcgaagctggaggcgagaggtcggagaagctgccagcggaaatgtcgaagaggacgttacggttggcaatgcccccatcgctcctactctcaaacagagggattcggaattctcgattagcgagcagacagtcgtcgccaaaaacgctgaagaagaggaacacactagggatgtacagcaagacgtgcccctcaacacgttctccagggccgtagacaagttgtctggcaagcaaggcgagcgggtcgacgccgtcaggcaggaaaccatcaagcaggagcgagttatcgaacagaaccagaccaagcaacagagtcaagagcagaagaaggctctcgctgagaagatggttggtgagtagtcacgctagactagcggtcaccttgccgctagctttcaggcacgaacctctcaggctgatcgcctcgcgcactcttcgtcgatttcccttcacgaagacactgtgcacgacctcatctgctcgacctggccttcggcttgcgagtttgattcgccgcgatccggctcggaatccgagtccgaggcctcgggcgagggtctgactgatgccgctcaaaacgggctcgtcccgcttcgagcgttcattcgggagattttgagacggagcaagagttcttgtgctactttgcgttgcgcagaatggtacctcttggtacgtcccggatcgtcggcctcttcgctcagacgtctgatcgtctgggcgaaagttcgtctttgtgcttgatcactttgactgatttgaccgcttgttcgtgtgtgcctctgctcctgcagcgagtccgcaatatcctctcggttgtccccgaaacatcttcatctgcgtccagctctggagaatcggaatcatccgaaccggatttgaagcgtctcccagcctcgtctccactcttgtgtcctcgaagagcattcttgtcggctttgatcgtcgctcacaagttcctccacgatcgcgtctactcgaaccgagcctgggccaaggtctccggtctcgatgtcaccgagatcggcaagggcgagctcgctctcgcttgcttgttggactggaaactttgggtcgggcgtgaagaccaggactcgaactcggataccagcaaggaacaggacgagaccacatggttcactgctgtcggtcaacaagtgcccctcacctgcaagcgctctcccgaggaacaatgtgtcgaagctagccctgctgaggttactacccagtgctcgagcaccgattcgtcgccttcgcacctcgccggttccatcatctccactatggattctgcgcctcgcttgggagttcctcacgctggttccgccttttcctctacggctggctctttcgcattcgtatctccagctcaatggcaatcacgggatcgacacactgctcgaactcgttcggtcgagaattcgtccatggcgcacttgtcgaccaggatgccgggtcttactttggatggatccagcgacacctcgggagctatcagcccttcaagttgtgttccaaccgaaaaggacggagagattcacgtgctcgtcaacggtgaagaacagttctctgtccaaatcacctcgtcgcctgaaagctttgttgaccagccccgtgcaagatggaaccctcgaaaacgcggctctccattagaagccgagggtcatgacttggacttggcagcgttcgtgcacaacaacaatctgcacatgtcgcacgcctgtcagactgggaaaaaacgaagagtttcgatcagcaagtcgcaaaccactcaagtgtgtagtgtctgatctcctcggccaacaaatactgtatcccttgaaacggtgtacgaatcaagaggcatgggttcttgggcaaaagggtctggccttttcgtcgtcgttttgggttcatggagagggagtcgatgacggtcccccgttgtcaaaacgcgatcatgtagcaactttgtatcttcagctacttacatatcatcgttgtgttcaagattccatcaatgatcttatatccttgccaagcgttcattctacctctttgcagacggcacttactccgcctcgagattgcggcccaaaacgatcgcttccgggtaaaagcatccggccgtgacaggggcgggcgggccatatcatgagaacgtactctgcgaaatgagtaatcttggtcgattcaacagcttgcgggttgaacaattggaaagcgaggcagcagcgcctttgaagccaacagagtcatcactatgagcggatcagaatcggaagacgactttatgtcggacaagtttctggtcgagaccgctccagccaaaaagacgcagcagacctacctggatcgacgaagagctgcacagaagaagcacctcgaatctcagccaaaaagcttgaaactacgagaagaggaaaaacgaaggcatggactagagacgagtctgttcgctggtgtcaaggatgacgctaatgctgttggatcaggggagagctcggcagggcctgccgctggaagcaaggccatgaacatgatgatgaagatgggatggaaggtcggagagggactgggcaagaagggggacgacccaagcgagccgacagatccccgcactggagggaaagagaaggcacttttggatgtcgaagtcgacgaggatgaggcgggagtacctgctggtcgagctggaatcggaatggcccgcaagcgtaggcggtctaccgagtcggcagagccagatgctccgagcacggtcaagcaaagggtcgagcctttgagggtttccatgtggtcaggtgagttccgtcaaatccgcataatcttaattgaacccccatttacacctttgctgccatggcactcaggcaaatccgggttgggagctcgcaagcgctcgccatcgcccatcctggcaccgggcgaacttcatcccgagaaattagctcagctcgaatccactacagaggactttcgcaaacgacagtctggagtcaatgaagcgaaaaagatcgaggggcgggaatgggctgcgagaaaggtcatggtcgagctggacgaggcgaatggggtcaaggtatgttgagacactcggatcggatcggatcggatcatcatgcgagacgtcggttacgtcgtgtaggctgatgaaagctacattgatcgcacagttccaccctctacatgtcatcccgactgcacctgcgcagacgatccctatcccactgctgcgactggtcttccctatgcaatgtgatgcactaatcgcgcaacgtcgcgaccacctagctcggaagctgggcgccggacctggaggtcgggtcgggatagacgatacatacggtcactacggtcgacgtaccgaaggaggcgcgagcggatctgaagatttgggaggtatctccatgatccgtgggatgagcaaggacgacaacatgtctcaagcggcgagactaaaggcgatgatgcagctggatgcgctcgagtcgatcgagccagacgtcgatctagaggatggcgatggggacctagcgtttgctggagcctttggagctggaccgaagaaggtcgatgaatcgatcaccgaagagacggcattggatgctgacacggtcgatatggccccgattgactggtccacgcatgtcgaaggtgttcaaagggttttgggtatggaggtgcgtagtccgacaaagcgtagtcacgtcctggcacccgaactgagttgcatttccttgttactagtcttctactcacctttccttcctcctcgacatgctgaggatggagcacttgtattgtttctggtgcggtaccaagtatacgagtgctgaggagatggatggtccaggaggatgtccaggggaagatgaggacgatcactagaggctccactttcgcttcgactatgtatctaaactaggcagtagttgctcacgtcaacacaaatcatgacagtgatatcggaggaggaatcggtatcgcatattccgagccggtctcgtcatcagagagttgtatcacgacctggagagcgcgatcgatcgacgacctggtcacctctgattcagcacgccttgtgagcgaagtctttgtccgaggatcccacagccgaccgaaggcacgctctccaggtcggtgatatttgttttagctagttttccggtatctttctctgcctgaatcgaccttgccgctgtgaccgtcccgtcctgggagagacgaggaggagggtcacagaagaaggccattcgtcaactggccccggcgttttctcatcttgttcggtcttgtcgtgttgtcaagcgagtgggttggagctgatactcacgatcaggtcgcagaatctgttgagctgccggtcgccaagatttgcgaggtaccattctttggttcaacgactgttatgtgagtgctggtgatggtggtgatggtattcatcgtgttgtcgatgtgaccaccactctataaatgatcaatgctcgactttagattggttcgcggatgagaaagggaagagcagcggggagggcagggttagggtgagcgtggaggacccaccccctctgacccgctctgacagacgccctgcacgcccgtcaagtccgcatctacagcccaacgaaatccaccatgcaatccgccaaacaaggtacccaacactggcaaatcgattgggacaccttgcagggggcagggaggtgggagaacgatctcatgggatggggaagtacggcggattatatgcaggggacgtcgatgaggttcaggtctaaggaggatgctatccatttcgtgagtcgaggatgagaagacatttgctttgcgagtccgaacgggtcaggggttggggtgtcgggctgggatgagatggggcgagccgggagactcgggctcgatcagggtatagagacgggaccgtacagacagagcaaatgactataccgagacaaagtcgagatgtgatgagcttgagagagacgttttgcgcgacgggtcgagggaagatgggttgcggctgcgctgtccaccaagagaggctcgttccccgggcctacgctgatcacgcgatatcttcctcttcctgattgccgcgaaatccttgtcgaataacctgatcgacctgatcgacctcgacctgcactcgaccgacgtcgacgacctggacaggctgagaagcaaggttggaattaccaagtggacaaggtccaggaagccaggatccctcccaagtcttatggtcagtgcggtactcgcttccatggtacacgtcggtcaagagcaagaactgatcggttcgggttccttttttttcccttgctcctcctcgacgcaatgctgttcgtccgcgggacatcctcacagccgaaaactttgtccacagtcagtctggcctaactttcaccctgggcggtcgatctcagacccagtcgctgacaatctcacacgtctcgtctctcgttccgttttcgcacagttcctggcaagctccgacgataccagaccaagtagacgatcgagcatcacgtcacggctcgtccgatgtcgagatgtcgagatcatcagcgagacaagaagaggacgaggcgcatgacccggtggatcgtcgtccagctgttctcgataaagtagacgacagggagagaaggggggaggggaagagttgtacaagtgttttccggtccagtgtgtttattatacgaatttcccgccaacatttctaagagggcggatgtcgctctgccccagcacgtgcattattgggcctcgtaccgagtcgggagtcgagcgtgaaggccatgatgtcgtccttcccaaatcagtgacagtggattcgggacaaaacgggactcggcgctgttcctaatgaccacacacctgaactgctgtcgttgttcgggagaccgattcgtaggggaatgaccgtccgtggcacgtcattccacgctggtagcggccgcgctgttcaaggtttcaaacgtagcacctcaaggtcgacgatcatcatcggggcgtccccgcgcagccatcaaagtgcagttgtggtcaaatgacgcccccgtgcatgggacggatcccgccacacccatatgtcgctacagctcggcaaaggctgcgttcgatgagaatcgggaacgggattgatttttctgccaccacaatcgtcagagtgaacctacctccaagtggtctcgcaagcctaaatttgacaccgctcatccggcagcggtgagctggagtcgcgactgtcaccatcgtcggtggctgaaaggtggctaaagcaatacggatcgtagtatccgcctgcatattgtattccgcgccggatgctatagccttaagaaatcctcctcgtatattattagctaaacccagctgccgaaatccaaacctaactggatagagcagctgaaacctttagttcacacgaaatgagcgacatagtgttaggcatctgcgccagacattatatgggcttggtccacactctccgccaaaccagaagaatctgacccgagctatatatcaacacaacatcatgatcaggatggagtgaagctgacaagtcgagccttcatggtcctagcgccagacgattcgacgagcagtgtggtgcttctctgaccgattcgtcgttcataatcctccggtcagatatttccaagggtgtgtgttggcacgtctgtacagggaagtcagctgctaatcacccggaaccctgaagctaatggctgtgtcaagccatcatgtcgagtgatttgaatgaatcgtatgagcgaaataacaatcctgaccaagagatggtgagacgctggtgaaagtagcaaggggcactaagtgatccgaggactaaccaaacgaccactgtgtgagggaagtatatggactgcccgtgaaggcatgaataggtctgctatggaatgtatccatgaccttgacgtcgcacgcacgtcgaacctaccacctattacggctcgaatgcgggtgagcacaagtcgcgcgcgatatcggagccgatgcgcgatttcagcgaaatcagctctgatgcgactagctactagcctcgaagaaacgatcgacgtaattgctggctcaaagctatggccgtaaacgaacatggaacccagcttggttgatcctgcaaagacatgtacacaagcacgatgcttgatgctcctcgccaaagacgctcaccacgctattgagcacgacgagcgatcgagcgatatattgctggctagacgacgacccatatgcgcgggcaaacggcgcaaagggctcgcacccggaagcaacgaaacgcgaatttggctcatatcctaaaactggatcgacatgcactttgctcggaactcggctcgaaggggctcgcgtttgtacgacgagaactagcggagtgaaagggagtaaagatcctggtctctccttggatctcgtataaaccttggcttactagagcattatatatatataccctttctaccctactctgggagacacgtcagacccgaatcaatctgcttcctgctcctttttcttacggcactcggacgatttccttccggctgcgatcgacctccaccgacactttcgcatcgtcattcatcaacgcttcgaccgagatcaagtaaaacccctcctgttcatcgtcaacgcctctacgcctagccaccatggacatgtcgggtatggaccacggcgggtcctccaccgatggcggagccgcatgcaagatctctgtaagtcgagatcgaggagcgcccatcgaagtcgcttccatcactgatcatcatgatcctcaccatccccgccaccatgatcccgtcgctttagatgctgtggaattggaacacggtcgatgcctgcttcatctcgtccgactggcacgtgcgatccaaaggaggtttcgctggatcctgcatcggggtcgtctgcctggtcatcctcctcgaaggtctcaagtacctgcagagaaagcatgaccgctcgatcgtcctcgctgccgcacaaaaggcgagacggatgaagaagcaaaagatgctcgaggatcaagaatacgaatccgagtaccaacaacgaggtggagaatcctcccgggaaaaggacgggatcgagacgctgacgagggcgtcgtcgacgaggatgacccaggatccttcttcgggatcggggtcgtcgagctgttgcaaccccggacccgctcccgtacctatccccgccccgctcgtcccggcgctcatctcgacctttatccaatccccgacggaccctcccggtcgactccgcctgacggtccctcaacaagccctccgtgcgctcatccacacggcccaattcgccgtggcctactttgtcatgctgctcgccatgtactttaacgggtacatcatcatctgtatcttcctcggagcttatatcgggagcttcatctttagctgggacgtgctcgagggtggcgggtgagtcccaaggcgatggcaggcactccggaaccaaaaggtttcttcacgtttcgacccgttggctcatacgcacgttttgcttgggtttagcggtgatgacgctcaagagacgaccggttgttgcgggtgattcttcatcacaccgacttgagacgagacgctatagtatcactagtagtactactactagtgctcgtttctttggacttttacgacccccatacaggctggcttgctctacgacgatgtgtcctttgtacgtgatgatctatcgctagaatacagttcggagaatggatgatgcatgagaactataccccgcgatatcatcgccagacgaggcgagttgcgcgaagagagccctagttgctagtcgagcctgcacgtagagatcggtttgacatgaactgacgaaaagcttgtacttggatcgtgttgatacgatccaaagattcgtgtgactatgagcatgagacagagcaagacgtggaatcgcaaagccgacagtcgaccagcagcctagcagcgatggggacgttactctgtcatcgacggtactggccgacgcccgcgctcgaccgtaattcgtttgagggatctcggatgaatatcgggtttcgaaaaggcgcgcgcgtggacgcggttcaagctgggcgagcacagagggggattacgatcatcaatatcggtggatggccatgtttcgtgtatgatggacttgcaggttccgagatccttgaaggatcaatgtcgagagctgagggatgtcaccactctagctggtgcgacatggattggtgatccattcgaggtggtcgtgtggggccatccatcgatggcagtatggcgggcgttatttcctgccggggaccgagacgcgaaagaaggtgagggcacgcgatggcaacggggttgaggaaaaaaacccaccacccccccccccccccctcccaagaggacagtaggaatatcggcccagaacgacatacataagcaacaccatgcagaccctagctggtctggcaccggccgacctactcaacaatataatcggcgtcttcaacaaacctcttgtcaaacttgacggatcgatcaacctcgtcaaagcagccgtcatctcttgtactttcagtgcagcgatatctatatatgccaagtaagttcaaacaagttcgaacacggtgaggaaggtccgactgaccgcggaatgttagctaccgtcaactcgctcatatggcctcgccggcgtaccgtgctcctatcaattggaacgacgaaaattcgaagacggaacaaccgcggcccaacggtcggattagccacctgaggcatgtgcttcgtcacggtatgatccatacgagcgtacactggctggtcagctgtggcatgctcctgggtggtatggacaggctgtggaccatatcgagcggggttgccggaagactcacccgatctgccgatagcttccctggacgagtaagcgctgatccgtgaaccttgtgctcgacatgacggatgtagctcatgctgatcgatcggcgcttccgctctagctaacctccacaagcgtgttcacgctcggctactttgtcctcaactggctcaccagctcgatcgtccggaaggtttacgaacgctcaacttcgggatccatcgccgactctaacgcgcgagaacgcgatctcgtgctccagaccttccccaaaatttggtacatgcgcaacaaggagaagagggagaaaactttacagtggcctcgctggaaacaaaacgtcgtgtttgcgaccatcatgtcttgcatcgttgggttgccatgtgtggccctgacggcgctgtacgagtcactcggaccgagcaggcttgaaccgatggctatcagcgttggggttgtcggctttagcgtcatgtgagctaaagcgctcgattgtccgattttgggtcgcagtgaaaccgactcttaatcgctcttttcagcgccctggtgaacggccccatcctgtggaaaaacatcaagaatagcgatacgtgttcacggaaagcaacgaaagatcccaggaaggggtccacctggctcgccacggctgaatggtccgagaagaaggagctctcgttcgaccctgtcgactttgaaaccaaggtccgggccatgatcaaggaacagggaaccatcgagatggtcgtcaggccggacaattgggacaagaatgacaaggaattgccagaagaatggatggccactgaagagcagtgagtcgatggatcaggacttgatgacaatacctgtgcgaggctgaagcttgatggctagctcggtattttatctgccagaccgattgctggtttgtttcaaggaacaccagctcgagtcgcgggatatggacttcaacttggctctcgttggtgagatatccagcttcgatcgagagaagcggtacattgacctctgcataacccaatctccagctcgtgcactcgtcacttatgattataggcgaagtttctactttggacaaggactcggattgatgagcatgtcgctgtatgccatcctccaccactactatgcgaaaagctcggctctgctcttggacgctttcccttcgctcccggcgacctcgacgaatcacatcccattggccgtttctgcgacgatgacaacctatttgaccgagtggaccggcatgttgtggcgcctggaacgatacagcgagtgccaggcccagcttcgcgatgatcggcgagtcatggaagccttgcccgaggagcatgccgagggctggaaagaggtcgtgcgagagcaagcccgggcgaccctcaaggggttaggtggcaaggacatttgcctcgatgtcgggactcgagacggcctgtaagtctgtcccgtgctccacattctgatcggctaaggctgatcatcaagcgttgactgcatagctatgcattcgtgaccggagcagcgctttccgagactgagcggatcgtcgcactcgacaaccgatcgtgatccgcacaggcgttcatcggttgactatccaacactactcccttattattaattcagtttgttgtactcgataccacgtcctcactgctgctgtccgcaactaatcggacttttgtagaccttaacatgaaatgcatcaaaattctaggtcatcaggtcgatgatacagtcgttcttcgggctttgacgggcttggcctatctgcccaagggagcaccatgtccagatcatggaaatacaaaatactatgcgacgagcaaacgaaagcgaaaacgagcacgagagcaacaaacacctatgacccatcgaaaaggtccagcaacatgatcgggtccccccgaccgtacgaatggcgactcgactaggcgtatttcttcatgaaatccttgtggaacgtttcgatcttggcgacatagtcctcgaccccggggcagagcgcagtgactcggagatggtacgttccttccttttgtccgaacccggacccggcgaccgcacagatcccggtggcatctattccagcgccacggcaaacaagaggacgacagcggtcgcagtgtcagcgaacaaggagacgggcacgctcgaggcacggaaaactcgtgctcacctagcagatccagggcgtacatgacatcggcgggtttccccctcttttcagcctctttgagcgccttgtccggcatctcgatcgaggggaacaagtacattgccccctcggccttttgacacgacatgccctcgagcgcgttgaacttttcagacatgtacgccgatcgatccaacaagctctgatgcgtgatcgacgtctccttttcgtactgcgcgtacgaaggttcacctggcttgggagggtcgacgagcaggtccaccccgacctgaccggtcacgggtgggcagagggagatggaagccatcttgtagatctggtcgacgacctgttcgtcgatattgaccagctcgaaataaccccctcgacgaccacactcgcccgatacacccttgctgagtgaatggaacgagatgagctcgacacagtccttttcgatgaccgagtcgggttcgtcctccatcgtccgcaagacctttttgaacgagacgaacggtttcgtttcggggtagtagatgttggtctggtagacctcgtcggccatgaggacgagcccctggtcgtaacacatccgcacgatctccctcatgtcgctctcctcgagacacccacccgtagggtttccagggttgatgacgacgagcgccttgatgggcgtcttggcgcggtcgaccgagtcgatggcggactggagcacgggttgggacaaggaccacccggaggattcttgcaattggtaaggaaccggatggcacgacaaggcggcgagcgtggccgtgtaaagcgggtactgggggatggggacgagtacgccgtctcccgggctgagacagacgttgaggagttgactgaccccggccgaggctccggcggtgaggaagatgtgttcggggtcgctagggaatccatcacgacctgtcggcgtgccgtgcatgggaggtgtgtgtcagttctgcacaagtctggcaccttgcagggactcgcgaggcagacgactcacgttcgataaactgggctaccctttccctaatctccttgatccctttgctatgcgtgtaagcgccgacactgccaatctcgccgtacagcttgttggcacgtgcgatggtatcctccgggtagatctgaggggtcaatgggtgggtcaggaggtccgggtattcgaggagagagatgacctgtgatgcacaagggccgggaaacgttagtccgagtgacacgcaggagaccaccgggcagacgtcgactcgcctgacgccaaaaggtgatgggcttctgatcgagacctcgttgttgcgggttaccgatattggccgtgacgaccttgtcgaacggcaagtcatcctgcgtactctcctgctgcttggctcccctttccccgctctccccctgcctcgaagtcatcccaccctcgtctttcccctgtccaccttgcttgtgcttgagcatctgcgcatacttgtcggccttgatggcgagttccccacggacggcgtattcgacgtcgaggatcgacttgtggatcgtgtcgaggttgagcgtgcgttgaccccggccgggagcacgggtctgtttgggtgtaggcggaggggtgagcatcgtcgaggcgggtcgtcgagagtttgttgtcgtcgtcgatgtgattgtaggcgaaaggatcgacctggtggtgatccgtctagacattaacatggtagtgagtgagcgatatgtcgattcgctggatggatggagatcgtgattgagcgggcgacgacgacgacgatagcaagtccgagattgccgtagagaccggaggcaagatggatggagtgtgtggtgtggtgtggacgggtctcggaggataaggcaggcaggcaggcaggcaggcagagcgagggagaggttgagatctatctagattaccatctcgatcgagtcggtgtgtgtgtgtgactcgcctccagctcgccccgttctcggccgaaaagtggcgacggagcatacacgggggtataacatagaccatcacctccaatgacgacgacgacgacgacgacgacggccaccaccggccaggggtcgataaggagcagcaagagtggggcaggcaggcagggtctacaggagggcgggcggaggggtgagtgaccggtcggtcggggctgacgggcgggggggtcgatgagaatgtgagattgttttgggtggtcgtcgtgctcgcctgcgctgactctggagtggcagagtcgctagtgtgcgtgtgtgtgtgaaggttcaggggctaagcaggcttaggcccgggcagagagcgggcaaagggccccctttgtcgagaatacgtgatcgtgagtggggtgtggtatgacggggtagggggacagtatggtgtgccggatgatgatgatcgagatgagatattgcaataactcggtttcgtccgttgttgctgtcattcgacgttggcaatttcacccgcgggcaccctcttcgctagttcgtgtgtgcgcatggtgtgtgtgtgtgtgtgattgttttttgaaaacctggttcgactcgcgactcgccctcattcgtcgccgcgttctacccgatcgggcgagttgcaaatcaaacaaacagcacagcacacagcactcacagcgatcacagcacactactgaaagagtcgcgcgagtttgtcgttcttttcacacgcgtcccacttggaattctttgaaacctcgagtcgcgcgcgatgtggagtccccgacaaatcgcaaaggagtgataccaaatggtttgaactcccggttatgaaacatgaccgaattcgctctttcccatccaaacattattcgtggtcatttgccgctccaatctcgcttctcgcgggctcgggcatcgtgctggctaacgcactactttgtacattcatcagcatcatcatcaccgtcgtcgtcgccgcgccgaggggctactaccctaccaccgaaagagctcgagcgggatagaatccgccatggcctggtatcccaggggattcgggtgcaacccatcccccgattggaaccccacgttaaactcgctcctcaacctcgtcgggtcctcgggatccctcaccgcggcgtcgaaatcgatgaccccgtcaaacaccccgctcgtcctgatccacccgttcagcgactgtcgggtctctgcccgcaagcccgccggatcgtcatacgaattattcccaaacggcgtgatcgtacccccgtagaccttgatccgatgagcgtgcatcctcgttaccatctgcgtgtaagcgtcgatgagctcgttcatgaccattgtctggttcccctcgtccgcgggggccgtcccgatatcgttgacgccctcaaagaggatggcccaatagacccccgtctgcgcgagcacgtcccgatcgatccggcccagagcgttcggaccgagtccgtcggcgaggatccggttacccccagcaccttggttgaggacggaaatgggcttgccagcggatcgaaggcgttcgtaaaagaggtcggtccacctgcatggcagatcacaatcgtcaaaactttagtctctctcgctcgctgtcaacggcgctactttgccaacacccgactgaccggttgttacggttcgtgatgctacctcgtccatcggtaatgctgtccccgacgacggcgatcgcagcggcgtgctcttgtttgggtacgacctcgaccccgctcaaaaagtacctagaccgtcccgccccaatcagtcccggtcggatgcctaccgtctcgcttcttgagactcaccagtggtccgtaaaagtcgcccctaccagatcggtatcggccgtatgattcccagtgaccatgtacgacgtcgtccggctccccgggtgcgccgtgatggctgaacctgcctgtccctcttgaaggtacatgctgatggccaacgtcgtcccgtcaacaacgtcccactcgatcgggtccgagacgatcaacgcgccattgggagcgttgaaccccgggtttccccggctgaaagtcaccgggcggatagagtcgggatcgatcgagctggtacccgtcgaaccattgttggaagaggtcagggcgaccgtgacggaatcgaccggcaagacgctacccccaaagacgttgctgaatttcaacctgaacgcagatccacccagggtgatcttgatcgtctgtctcagagtggcatcaaggaacacgcccgtcgaggtgttgaaaggagccggagggaggttggcgggctcgcacagctggggcatggtcgtccaggatcctacccagttggaccacgagtcgactcgagcgtgcccgttgtcgttgttgcgtcgggtcagctctgatggtccatgttgagcaggtagggagagtacagtgctcaaagcagagcataaagccaagaggttggtaagcttcatcttgtcgtcgagttgcttctcagtgttctggctcgatgcagacaggattcatcgtcccacgcgtccatccttgacggtcgaggtcccctctagctgtcccttatatgcttcattcgtcgcatgttcagacaatatatgagcccgttagctctgaatcccggtccgcgtatccggatacgactcgagcgcacatgacctacggaccttacgaatagctcgaccctgtcgaagggatgttatagcagggacggccaaccactcggggtcgaggagtcgttcgaggtgaattagcgccggaagattgatcgggatcgccattcgggggattgattctgcgggcggaggctttcgcaaagagtacatcggcccgagagggtattttgatcgcaactatcgggatgtcccaagtcatccaggtggtcgacatggatggggggctgctttcagtatacctcgtcctattcaaacaagtatccctacgatcacagctgcgacatgatttgcgaggacaggtagccatgatagggccatactgatcattgacgataggcgtcatcaggcgagagcttcttcccaacccctcaaccccacggccccttcattccgtcgctcgctgtccactccttcgtttcaacggattatcaaagttgacattcgcaaacatatgcatcaatgaattcaagatcaagctcctcctttcccgctcagcggggggtttacagaatcaaatcgctatcgaacatcgcctatatcgagacgccgacatacggcgccgtccttctcgttcgcactcaggctttaactcaggcaaccctggttccgacattggtaccgtactgtccggcgtagttgccaggagatcgatattcgcaaacgatgctgtcggtttccggctgcatcacgagagaggtcagctgtgcatccctgaatggaggctctggacgaaagactcacccaacccggctggatggtaccagcaggacacttgacgaccgcgcaaccgacctgggaagttgccttccagacctgtcgatcgcagagttcaaccctattagcaacgctgatgacgttcgcggcatgccgacttcaagacttaccacttgggtccagtggctgtacatgggcgaagccgggttgtagtcgctcctctcggcgttccacccgttcaccccggtcgaaacaggctccgacccgtaggaagcggccaggttttcaccgtaaggtcctcccgagtgtttccagaggcacttcttggcgtaggtgagagcgtactgctcgagctcggtattccaagtcaaggggttggcacctgcagaggggaagaggggatgagaatcgaggtccaggttagtctcgatagtcagaaccacggtgggccttggactgaccataatccttcctctcggcgttgtgcaagtcgagcagcaacttctgttgagcggcggtagcaccccccacgctggaagcaccggtagcagcggcctgagatgtgacgggcctggtactggtcgccgaggagatcgcggcggaactagcaggtcggctcgaggtaggggcggcggacgaggccgggcgagtcgtggtagccgccgcggaagaggcgggtcgactagaggtaggaggtgcggacgaagcaggtcgggtggtcgtgctaacaggtcgagtggagctgctagccctgctggtggtgacgacggcagcgttgttcgcagccaaggtcgatgtgggctttccaaagtatccgtcctatgtcaggcatgccccatacggtgatcagccataggcctacttcgccggccaacactcgatgcgcggccgactcacgcagacttgggtgcattggccatagtccgagacgtagttgcctccggtctgcctcttcctggccatgtcaacctttttgatactcagaccgtactctggttcgggtttggcagaagcgaggaagggcaggacggagagcaaggcgacgagcggggtggtgaggagcatcttgttgaagtcttgtgggtaagcagtggtgtaaatgcagggggtccgtcaaggatgagattatggtggaaagatgctaaaggctaaaggctagtggcgagtgttggtggaacgagcgtttgtggtgaagatgattgcaagtgcgaatgctttagccgtcaaggctgattgaaggtgatgctacttgtatgaaaagctggttggaatgggtttgcttgaacggatgaatcgaggttggcggcgaggacgatgcagaggttcgaggatcagggccggagagtttatatacaattgcacgctagtttagctctggcttaccagggccgatctagggcgagggggtggggggtgggtgggtgctggttgatgcgaggaagagaaagaggaagaggggaagagacacggaggttgatgggggttggtggcagacagagagacagagagagagagagagagagaagggcaagggggaaggaagtgtgaattgggcgtttcggctgatcgcctacctgctgtcgtcgtcgtcgtcgtcgtcgttgtcgagctggcacggagctacacaggccacacagcggagcaaagaggcaacacaccaccaaagggaggcaggcaggcaggcaggcaggcaagcagggagggcaaggaggggagcaagataggtcacccaatcaaatcacgtcattgcgcaaaacaactcgacgggaatcgatccaggaattacccgattcggaaagttgaatccgatcaacatccgctctcaaccccccatcgtagctcatcgtttctcacgcgtctgtaggcaggggcgacggagggttggaccacttgaaaccccacacggtagatcccagtcaccgagattgcagccggacgaggtgaccatccacacgtacatcgtctgtttgatgcttgcgatatcgactagctattctgttgctcattcgaacgatcgatcgaatgacattaggacagctcacccataccacccccttgacctgacccgagtctcctcgtcaaccgatgaaacgcctcgtcgtcctcgtcgtcgtcgtcattgcctcttcgcgtgcgcttgcgcttgtcgtgcttctcccccgcgcgaggtgtttgcgctttgaattgggtcaacatcgaatctctctttgcgttgacctccagctcccttcccgtaccccgacccccgaccctgtcgagcctcactcgaacagatcctcgacgacctctcgatggatgtctgaaaccatctcgctcgatacgccttggatctcactcgattcaaacccccccccctagtcaaggaaataacagttagcggaaaaggaaactctttttttttcttttttttccctttttttctcgtccccccctctctatcaaaaaccacgtacgtccaacctactttctacccgtcgtcgtcgctgccccggatcgtagacactgacgacctcgacccctaacccagcgcggaagaagaccccaaaccccccctttaaaacactttatatacaatgtctgacgctggttccgatgctggctctcgagccgcccctgccgacgagatcgtcgtcgacgacgtcgaagtcgccgcccccgccaagggtgccatgtcggtcgaggacgctctccaggaagtcctcaagaacgctctcgtccacgatggactcgcccgtggattgagggagtgcgccaaggctttggacaagaggcaggctcatctctgcgtcttggtcgagacctgtaccgagggtgagcgtcgagtcgaggtcgaggtcgacggttcatcacgctgaccctgcgccgtcccactctgcagccgagtacttgaagctcatcgaggctctttgcgccgagcacaacatcaacctgatcaaggtctcggacgccaaggtcctcggccagtggtccggactcgccaagatcgaccgtgagggtaacccccgcaagatcgtcgggtgctcgtgtgtcgtcgtcaaggactacggtcaggagtcggagggtttgaacgtcctcttggactacttcaagagccgatgagcgtagggtctccaggcaggggggaagtcattggtcacgtttggtgagtgtccgcgccttgtgtgtgtgtttgaatgtggatcccagtctctcttcccccacccctttgcgtcactggccggccctttcgctcctttttatgatgaacatggaactccctcttcgcaaaaacacgttgaacgataattcctacggaatcgaactcatccgcttcggcggacaatacgttatgtctgaattcgcggcgaacgtcggccattaccctcttccacgctttgcacgcgcgattccgcaccgtcatcgcaacgaccatggactgacagacgacccccttcgctcgtttttgcgcgtttctctgtttgttctagctcgtgatcatgcgataacctcgccaaccacccaacggactatacgcctcggtgctcgaacctcgactggcattgttgtgtcggaacgaaaaggaacaagagtcggaggagtagaagaaaaggcggagggtgatggatcttggtgacgtcgatgtgtcgggggtcgatctgggctttggcgtgggcgatggaacggggaggcgcgcgcgtgatctctctatccatctctttcagtctgtcttactcaagttggtaccggtgtagaaacgttatcaatccgtcccctctttgcggtcgtcgtcgtcgttcaagtgtttacagtcgagcagctcatgagtcaagctgccaagtcggcgaacgccaggcaagatttcgtcccggactctgtctgattgattcagtagcttacgtttggcagccaatagtggcgactggtacgttcgcactactcctctgatcatggcggacaaatcgtcgtttcaactcgcgagccctgatcgctacataggatagagctgacatgaattcggactctgatattcgggacctcagattcgaaccggtccaccaataagaggtggatgggatcacagatggttcgtgcgagtttgacttgcgcagaatcgtttgaacgcatcgttcgattgtccaccatcgtgtccttgttctgtaggatacgatattcaagcccggcacctcgccccgtgtacctagctgactttgaggtcgagaccgaggaaaccgttttataaacgatggtgttattggacctttcgcccaggggcgagatatacgaacaccctgggtttcggtgccctcaaaaaaacagatcattgtgcacaaagcgccttccgataagcatcgattgacaagtgaagagagaagatctttatgacatccaccactttcgaatccacgccatgaacgcaagcgggctgcactacgacccagcttgaacggtccagcagatggcgagactgatgtactcgatgccgagggaagcgtgtcgaacagggtcgtcgagaatggagcagagttgaatgtacttccccgttcgatccctggcctacttgacaatgatcccgggccctccaatcacgagcacgtgctcgacgagcctgaaccaagcccccgactccattagacgaatgatcatcctcccgcctgaatgctctgctcgaccgctggctgtgctgctgacgccgacgccgacgccgacgccgacgctacctgttgatcgacgaaatcgagcgcgatctgcacaatctctttccaatcggtcatcgctcccggacctattccctccaggacgttgaccaacgatcagcacgcagctcggtcttgcccgtctcgagccggcgtgagggggggtgagggggactgaccgatatccccacaagccagagctttgccctcttgaggtccatgtactcggtagccgatctcgtccttgacgacccctgtttgtttcttggtgagtggatgtgtgtacatgagcgtgttcatcgcggggaagagccaagtggtcgtcgaacccgggtctagggcgcgtaagagggatgtctgggcgggggcggggttgaacatggtcgggttggcgtcagctcatgaggaggaggagacgtcgagcaggtgacgttgtggactgaccgggaggttatcgcatatcccgttggagatcttggcgagcatgttggccgagcacggacagacgaggacgaggtgcgcccatcttcgaagctaaacgtgaatgtcggtataggtgcaagatcagcgggcggagctgcgttcagttcggacgccatgggactcgcctcgatgtgcaggatagggtctccgatcttgttccacgtctaactaggtggttcgtggtaacagagtcagctatgacggtctacctagacctgacgcctcgtgtgttcgaccactcgccccccattcatcctcgtccgtccatacccgaacccgtccttgactggcctttgcgacctgttccggggtgtaaaaggcgagggacgacttggtagccacgacctggatgtcgatccggtcgtcctgggtgcatgcaaggtgatgatcgagtgagcatgacatgtggcatctctgggcagacagcgcagagtggacttttgaccgaccttgatcagtgtctcgacgatgagtgggatcttgatactggcgacgcttccgctacttatcaacaggacgttggtcttgccaggtcgagcatgttccgaggctatgaatgtcatgtcggcatcgaggtgacgagaatggggcaagagagatcctagagaagagttgggtcacaactaattcaaccaaccttgtcccttgactctttctttccaggtctcgatattacgaatcacgatggatgtattttcggaattaaattattacgtcaatacggaatcaaattccagtttacgtcactctatcggaatcaaattcgatcgaaagcgacaacgctatggacgaaccgggttttgaagagcgaacggagttgttgataagcaaaagggaaactaccatatatacatacacttcttgttcttcactacactcgccccgagacagagcttacctgtagttcaaggtcagattgcatattagtgaccaatcgctcggtgtcgatcggaagtcagtctgataccagttcgacaagccccctgtccggtaatcgaggcttgattttcatgccagcctctcagtacgcaagaatgcaccatgactgggagcggttccttgtgttcagatcaattccttgttccggtgtccagagatcatcacctaaagatactgctctgatgggccgtactattacacctcgtatgcaatgggcattgtggatgccaatagcagcctgaaacctcgaagtaccagggcagctgtacagatgaatgagagatgatggtacaagggctccggtatccttgaaacctgagaaagtgctcggctgagagcgctcgtacatcgatatgggtcggtactcgagtcatacatcacgtccgggctcagacatcggccttgcatatggatgcggagtgtgcttaggataggtgttctactggacgaactcagaggtgaaagccggtcttcaatacaggacagacttccgtacggtggctaggatgtgagaggtcaaacttaggttgtctgacaaggaggacgccacatcattcggaccccgtcgctatctgagcagttactataggccctcgcgaaaatctcagtgtcgaagaacatcaatctgtttcaggaaacagtgtgcaaatataagatgctgcgtaatacggaaggtagctaaccgcgccaccaatcgtcattgggcgatcaagcacattcttgcgctcacgtgcgtgagctgaaacgcgactccgggttcatcggtttcctttcagcagcggcatgacgccatcgttccatgaatccggacggattctcgactccgttctgattcgcttaagccatataagaaattgtaatgggtgcaggacagacaggctcgtacttctaacacccacgaagcttctgtcaaatccgcgccatcaacatcatcactcggatagaaaaggcgtatctgtcgccaaattgaattcctagcgatcggtctctggcgcgcgttacgtgccacgaagcaactacctgatttatcccgtcgagtcacaaatatacggttatggtgtcggatcagaatagtcttgagcatgtgcctttggctcaactcgattccacacagttctggaatcgattcctcgacttaaagacacagaactggaactccgcatcgtactcatggctggataggatgtccgccctgaggcttcatgaagcgctcgaagcggaacggtatcttcatagacatgaaccgactttggaagccatagtggctagattggaccaaattgcgatccaaggcgaccactcatggatacctcacatccccgccgccctggaagctttgcgccaggggaagctgaaacgccactcggacgacgagcggcgccagagaggagactgggaggactctagagccgacgggagactaaccacggagatcccgaacgacgtgtctcacttgggcaaggccacgaccgtaagttcacgggttgcagcttccggcctgtagtcaggctgagcgcttggaccgatagcaatcactcggaaccaagccagtagataccgaggatggatctgtgagtcctgctctgccacaaaacggtgtgacgtgtcggctatgtgctagacaaacgctgaccacgaatataaaaacagtcataccgaagtgtccccttatctgatggtaatagctcaaatgcaacagcaggtaaaaaattggggtcaggcgcagagttcaaaactccaagatacacaacgtactccgagtacatgttagtgtccgatgtgagcctgttgccactggtcatcgttcgttccgatttgataaatctctatatttcctagattgaagaggattgtactagtggcgcggcattttcagcctagatgcatgtgaccgatggcatagccaattgcgcatcacatctacaaaggagaccccagagtcaggtgcaacagagcagtatgggtgggacgccccaatctgatgattgcgcagcgagtcgacatcctaatttacaagccttccattgatggttcagccaagagtagtgaatacaaatcaataacacgaccgcgtgacaaactattataataggcatcgcaaggttcatatgtaaaatagcgccgcaactcattgggtaaaatgcggtttgtactacaaacggagtgatacacgtgccagacatctatcttccgctgggaaacatgaacgaaagcttcgacgaggaatcaatgatgaatgacgggacactgatgatggatgtcgtgcgagagaatagagaacagctacccgaagacgcatttagtcatcccacaagtcgacaatttttgacccgggaatatcctgatatttccttcgactgcgataccttcgaagcccttcgcaaacatatgcttacaccaaaccggacgagtgctcttcttgctcccggccattgtgagggtatgggtgttgaagagaaggcccgctctggtgagcggcgtgtcaatcaggtgggatgagacaccggaagctgatttgtattggtatctcaattgtccagatatggactggtggatagaatccctttgtatcatcattgactatatcgtcgatcaaagagtagtcgtcgacccaaaaggtccaggtatgtcgaacttatgttgagctgatcgatgctgagtcgctgctgagggtctacgtagttgggaaatctttcacggaaggcgaggtattgagagctgtgaaatggtacgaagaaattggccatgctcaggaaacacaggaggggcgaaatgaaggctcgacagaagacgagcaggatctccacatgaccggcatggggtcgggccaaagcatggtgagtgtttcgcacaacgaatagtaaagagcggggttcgttaaatatcgagctcatgacgatgtttatacctattggtttcgtttgacctggatcagggcgaggagttcgagcagtctgtcggcatgaaggtgagttctttgaagaggatattgcgaggacgagatcttcgcattcgactgaacacccttctctcatccccgcccgcctcagcgcaccgacacattctatccatctagcagtggacgaacatttttcgttaactcgaaacggtcggcagacaccgcagggctccaaacgttgtcatcggagtataagcgaagcaatcgaagcaggttcagccgtcggcactcgctcggcgatgatggcaactcgttcacggagccggacagcacagttacattcggtgtgcccctgactactagtgatggccagcatgagctgtaatctcagcttttgagagcatgtagagcagtccaggatgacatttgaacaaccgcatctgtgcgattcacagaggtcgcaccgtttgcccgtgaagacacaaagcgaactgaaacttcggcatgatctagtggaaatctggaattccccaagcagatcacggtagccttaccgaatcattgggaccttcagacgacggccaagagggatctcagtcgagtaaagagcgatgatctcaaagaagttaactgaaatgatgacgtatgcctcgatgcactttgtgggatccgacgcggacctggatcgtcttggtgttccatcgagtctacgatgctgtaataagagtgaattcacctacgatagaatcctcccgccggaaagacgacattgtacggttgatacgatcctgttgtaacgatgaaccatgcgtgtttcaccttggaaactgctcgaaattgctagcaaacgcgagatttcacgagaaatcacgtgatcacctagtcggggacatcaccccaggcgaccctgttctgacctcatctcactccatcccgtcatcatcattcatactccaccctatacatctggttaaagctcagtctacagagagtctacagtctcgccacaagatctcatacgtaacgcacgaagacaaaccgaaaaagcaaccatgggtcaggattactacaaactactcggcatcgacaagggtgcatcccaggacgagatcaaaaaggcctaccgtaaagccgtaagcaaacgatatatttgccctcgtatatcgagtgtcaagctgatgctcaatcaatcttcgcaacttaggccctgaaatggcacccggatcgaaacaaggacaacatcgcgactgccgaaaagaagttcaaggaagtcagcgaggctttcgaggtcctgtctgatgacgtgagtcgagccgcacgcgactttggtgtcacctggaccagtagctgacctcatgatctctcaatcttgcccgcagaacaaacgtaccgtatacgatcaatacggcgaggaaggtctcaaagcaaacggaggtgctggacccggcgccaacccgttcggagcagggaccggcggtggagccttcccaggtgcttcgtttgggttcggtggaggtggcggtggtggtggattccaggcgactgaccccaacgatctcttctcgtgagtatccgagtcgcttcaataaccggacttcatcgtgctgacatcggcttttccgataccgtgcagacacatctttggcggtgggatgggaggtgggagagcagaggggggaaacagaggtgagactcgtagtaaaccccgtcgaagggagggtattagcgggggacgtcatgcatcatcacgcatcatcatcatcaaaatgagggcatatacctcggagtactgagtgtacatgcaggaacacccatcacatctatgatcgaaatagatcgttcagaatcacagacagacctcataccacgtccgataggccgatagcgatcagggtgtaaacatgtagatgcgctgcaaggtactacagtagggcgacactactgctactatcccgcgacaaacgaggatgacgatgagaacccccaaatcacgcgtttcctgttcatccactacgacgctacgaccctgtgcgtttggcgcgcctcatacatacaccacgctcgaaccatctccttttcgatgcatcgtatatcccgacgtataccattctaccggagaagttaccccgttagcccctcgctcacagctcttgcttctccccggttccgatccgattcacactataattgtattcgtatttctttgcacgatgcgcgatgcatattgggaggaaatgaaactggtcgtcacgacgtcacgaaacttcgaatcgatccaaccagtcctcgtccctccttttatcgtccggttccaccccctttgtcatcatcgagttcaggcatcaaccaccgatcctgccctctccccctctccccctattgtattccattccattccattccgattccgattccgattccgattccaccctactccgccaccggagctctacttcttcttgctaccaggaccaggaagaggagtcccgatcgtcttgggatctccacgcagcttgaccccgatcgcgcgctcgatcttggcgaggagggcgacgttggggatggctcggccggcttcgtaatcggcgatctgccggggagggcgagggtcatcgtcatcgtcgatgtgagagagagggaaagagaggaacaggaaaaacagtgcaagaaacgacgtattttcagcgtctctgtatgcgttcgcgcgaaaaacgacgacgagccgcccgatcgacccgacacgacacgcgacactcaccaccgaaggtttctcgttgatcttggtagccaaatccttctgactcatgctctttccctgatcatccttcttgtcctgtcgtcccttggcgatggccgcacccaccgagggggagacggtcgaggggggtttgacctcgttctccatgtcgagcttggcgatccgttggtagtcggtggctggaacgagagcaggtcacacgaggagaagaaagaagggggggagagaggtgacaaggaaagtgtaccagatgatgtcagcgtgatgaacccgggacgaacgcgtaacagtcatggtcgtcgtcacacgacccccaaactcacgtccaccacgactgttcgatccggccggtcccttgctctcggtcgacacggcgattcccatccgtctggcattgttgacggcgctttcggatttggtaacggtagccactcgcttttgacctcctcggaggacggtctgcttgtcccaatcgtcagactgcgaggcgaggcgaggcgaggtcagcgaggtgcaggtatctgcgcgagagggacagcggggtgctcaccattttggtcggttttggttaaggttggtgggtggtagtggtaagagatgagagagtgtttggagtatgatcctcttggtggttgttggtggtagtcgtcaatcgatcgatctgctccatcatttgtctcttgatctctttgcgtttgcgaattgatcgaacatgctcggagcttcgtcataggagatgtattagattgataagctgacacatctccatgacgtgtcatttaaaacacaatgtcccccctcaatcaaagcagatcgtcctccggggccatgcacacaaattcgctacaaacagatacagagcgtatatgaaaccctcatagccctctgccttcacacaacacgccccttcatccaactcttatcctcattaaacatgtcaggacgtcaaggtcagtctgatcgatcgtgaccatctttgatcatccattgcgatcgatccactcacccgcgttctcatccctcctcttccccaaaggcggcaaggtgagctcctcgtcctcgtccgccaaacacatcacaccgcctcgacacaaactcactcattaacttgcatcacctcgcatcgcatcgattcgtaaaaccaaaccctacagctcaaacccctcaaggcggccaagaaggaaaaggtcgaattggacgatgacgacaaggcgttcaaggagcgcctgaagcgggaacaagccgagttgaaggctgcagctgtcaaggccgggcaaaagggacctttggcaggaggtgggattaagaagtaggtcgtcgtcattgtcgtcgtcgtcgtcgtcaagagacggactggtcgggctgtcgagtcgtggcgctgatacacacaatcgcgttggtccggttgatgaacaggtcgggcaagaaataaacggatcgtctcaccttggtcacgccaggtcctggatgtccgatatcgatacctcgccatctcacacctcgatcctcatctctctctctggattcaggacggactctctcctgcccggatcccaccgcagcctatcacccggacaaccggtgggaccggggtataaaaggtcgcgtatggggaagaagaccgccggcctgagccgtgtatgtcgagacggatggacaagaatacatacctccttccctcctgaaaaatcctcgctcgtacttgaggggggaccccgatcatcttggttccggtgctacctacatccatgctatctcccagccgggggtagtttcccgtaggtcagggttcgtcctgcatgagaaaaaagactcggatcgtgcgttcgtcggtcgtcgctcgggttcgaatacaaattggtggggacggtgtgcgctttgtgaacagggagggacggtcgggtcaggttcgagtccgagatgaacgggagagggcattacttttcgcgatgatgactattttagcggggaccagagacgtcaacgaaggattccagaccaaagacgcgaggtcgtgagccgagtaggcgacgattgaaggagaaagacttggattttcccgacatttggatcgctgtgaaaacggatcgttcgcaacgggtcgtctcgtctcgtctcgtatttcggtcggatacgattgttcctacgtgcagcttgagttgatgaaaggcctcctacaactgccaaggcacgcgatcaatgttacacaacgttcgagaaccttcccggactcctgcgtcctcggaatccgagactacagattcgggattttaagacgactgggaggagcgcgcgtggctcgaacatcctttggaaagtccacacggcagaaatagcgagagtgacctgcgagatactttccgacattcagtatgaaggtcgtgaatctctcccttgagtttcggcttcggacgacatcgcccaacccccaagtgtcaaacccagtcatgcaggttggcgtagccatgacgagagtggctgctgtttacctaccagtcttcttggcggaagtgcgatgggactggcggtcataattccgagttgcagtccctaataaagctactcaggctctagacagatccacaggcatggaagcatttgttgacaaacaagcaagttttgtggacccgcgtcgagattcactacaatggtgaatgccagctgttcgtcgtcgcatcgcggtagaaacccactcagatgaaaaagccctcgacaaggtcccagtgagtttcctgcatggcgcctgtctatcaatcactagctacttttgggagcggatgaaggatgatcctcatttgaaaggaaaatcccgggtcggtcgcctctagcgattccctgctgtggaattccagcaatgcacaaggttcttgcccaaggtagagatggcagatggacggcaaggtcgggttatcgacatcgagacctacctcgtagcatggaagtgaccccttcgtctcgagggggcgagggagtaacgattcgcttctcaacggataaatcctctcggtaaagtagttttcagctttccacgaaatattcgccttgttggcagatcaatcagttgccgaacaaacagatcaatcacaatcgatccgtgactcacaggtacaccgcactggccttgttgcatcccgcagattagatcgtcgaagaaagaatagttttgctgcatgatcgagttgaacgaagcggcaaagatctcatcctgcaatatcggtcgcgtttcttcgcagcctttgacaagtagcgtcactttgttacccagctcacgtttcaggttataaccagaattgtatgctcgcgatgtcttcgaggcggcctttgtcctagcgcttgacgatatagcgcggattgtatcatccgaattctctccccacggaccggaggagctggtagtaccggtcgagtcatcattgtcaacaagacattgtgaggtctgggaggcggtatgttcactcgtagcggagatgttagagaacccccccccccccccccccccccccccctccctcttcgtccctcctcccccctatcccgactccccgctctccacatccagctcgtcccatcgtccacaccgagttcctaaaatcgtacactacgtctactcgttgaaacccaccgcttctcaaacgcaaaaagggatcaagctggactctgaagggttctttgaaccggggcaaggggaagagggggaagggtttccgtattatgcgtatttggcggtgaggagcgttttggttaatgtcaagcccgaggtcatatacttgtgagttcgagggtttcggctcgatgtcgagtcgagtcgagctgcgaaattggtaccggcgctgacgatccgtgctcgatccgtacaacccatccccgtccgcctcctctcgctgtcgctcttgatcgaacgcgaacacatttacctgtagccaccatttcaatacccccactggaccgtggtttgacctcctccgaccccacctcaccttgatccccgcccgggtacctaccaagatctttggaaacgagttgaggcatttcgctcatcggtccgatgtaagtcttgtcacctcgtcgcggtcgcctagtggggagatatacaagaggacaagacagaactgatgcggtctgccgtgttgtcggacgatcggggtagatcatcaggctggacgcgcttttacagacgggtgggatttacctggacatcgatacctacgtgtgagacatcaacagaggtcccataaatgggtcatcccttgaaaaagctagagactgacgccgagacgatcgcgatcgacgtgggatggcttcaactcgataggattcgaccgtttgacgagtttctggatcactcggtgacactcggcatggaggccgcgacggattcgaggcggcaaaagttggatcccgagggtctttgcgtgagtgcctcgcgtgcgtcccacgagatgtctggtcggcaaatgaattgatcggacggatgataccggggcagaacgggatcatcgtctcggaaccccacgcatcattcttggaacgctggagatcgagttacgaggatttcaggccggacgaatgggctcaacattcggtcgctcgaccttgggtgagttcgcccccctcgggacggaagcgccgggaaaggacaaagcgttgaccgttcttgcccggggtttcgtaggagatcgcacggaggtacccgaccgagctgaacgttctggatacgagagcgttcttttggccagggtggtggggtgacgaagtgaaacgggtgcacgagacggacgagtatgatttccatcagtctgggcaatacgcgtgagtcgtcccggtcggacaatgatcccgggttctgggacgggtcgacgctgacatctctggcgtgtcgacggtgggggggaaattgtcacaggtatcacgcttgggagtcgctggcgatgaagtacctagaaaaactcgacccagtcgcgatcaagacgagcgggacgagtttcaacaagatggtccgaccgtgagttggcgctagggtctgatcgttggtcgaaatcggggattgccgtgtatactgatcctccatgcttggtcgcaggtttgtcggaccgaccgacgaagcggtgtacgccgagtggaagcgaaccaagctggactgaggtctcgccacctggaggtcaatcgagcgggtcgaatttgttattatatgtacgggagcacagcaaagacgctcctcccgctagatgcgtgactatactactacaaccatcatcatcacccagccacatcgacatctagtcccaatcgcctactcgccctcgtcctcgtcgtcactcgtttcctctctgacaaccccatcccacctcatctccctaccccaaacccgttccctcaacccgacatccccgagatcatcgacaaactgcacacccctcacctcctcgacgaccttttcgacgatccatcccctcttttccgccaactcgaagaatctgagatcccgcgcccggtgttgtgggaggtgatgcgagtggaagacgagcgcgacgccgttctcgggatcgataaggcgttcgagggaacggaggaggggaatgtgttgagagtggttgaagatgaggtcggataggaggagggtttggaatttcgacaagtccaggttggggctggggtcgtggtcgggtgtcgttgttgtcatcagagaggtggtagcggtggtggtggagctgggcgggtttggcggtatcgatgccgacgccgatgttcccgctattgtcgacgttgattgatgtgatcccgacccttcgcccgcttgcaagtgcatcaacacgtcctcgcaagctttgccccagacatgcccctgaacaacgaccctctcttccaatcctatatgcgtccgtgaattctccctcacattgttctctagattcttcaacaattccggactagggtaatcggtgaggacgaccttcctccctccgagaacgccggcgaccaaccctggcactccggcccctgcgccaaactctacaacgttcctcccgatgaccaaccgatgacgttccgcgcacatgtggttggacatgactaggctggattcgaacaggatgtgaccccatagggaatggtgtgagccgatgagggagacggtcaatggcggagtggaagggtgggtattcgtagggaatgtgtatgacttgatcgtcggcggcggagtagggggtcgggctggttcctagaggggaaagaagcagggggaaagtttagccgaaagggtgtgaggttgggatgcggtagagatgggtgtgagatgggtgaactcacggggaacatgtcgcccatcaaattgtcttcgtcatcgctcgtgatcgacatggtgcgatagggtcctacttagaagtgtgtacaagtcctgcagaatgagatgggtggatgtattgtctcgttcacaagagcaacatgtcgacgataccctagctgatcaaaagttggatcaacttccactccccccccccctctttccccccgtcgacatggttagaaagcggacatcacgtgatttcacaaacggacaattcgatttctcatgtccgtgtttctctctcctctcggaaagatgttgacgtcagcaaagacccgttcggaagtaaatttcagtcaatctcggatgtaaatcgatcgttcaaccgagtcgcatgtcagcacattcatttcatggacccacaatacagcatgtcatccagctcggtatgtatacatgcaacatgccacatgtagaatagcttatccatagtctagctaaccacgtcaataatcacagctctcgccgtcatttgactcactctccacacacacacgcacacacctacgcgccatgtccgactctccccaagacatcacctcgaaacacgaagacgggttgaaagagacttaccagtccgagccttatcaagcttcgggggcggcattgatgagtttccagccgctacaagggatcaggcagcacctttgtgcttttcattgttacgcgtgagtcgattagggtctggggttggagagctgggacgtccgtctcggtcatgggagggatgatggttctgacccgggttgtttgttctttaccttcatatcttccctactccctctctcgtttgacactcggatctcctcatctcgcttcaaacctcctcacctcgcctcgccgcatcatcccgctgagctcacagggacgaacccactcgtcacgtcaaggcgcaccacctctgctcccaccttaaaggtgaaaagatcaacatgcaccagtgtatcatctatgatagcaacgaaccgggggcgaggttggtagggatagagtatgtcgtacccgccgaggtagtcaggggactgtgagtgcgaagcggtggatttcgggctggcggtaagtctgcagtggtactgatcatgctattcttcatcggtacgacccggctcgcatggcgactccccgacttggatttggaccatcgacccgcttctgatacttcctcggcgtctatccctaaccccccagcccggaaaaagagaagaaatactggcactcccataaattcgaggtcgagtctggtctattgatgttgctcggaaagtccttggtacccagtgagttcgagttcgattttgggtctagtaccatcctagatcgagtctccccaacttcccactggctcgggcgaggtggacgtttcctacgaattgtcggtccggggtggaagacgaccgacaagctggctgatattccgtactccgtactccccccacccctccccccctcttttttttctcgcccatcatcgcacggtcactcggatcccactcgtcatacgtcttgcaaaacacacttgacgacctcttcgctcactcggactcggactcgcgctcggactcgggaacttgtcctcaacctggacctcgccctcgacctcgacctcgactcgtgatcgccctcggcagacatgatcatggatcaagccgagatcccggcgatgaccgagctgcatgatacgtacggcaagacggttcatacctgtgagtccttcgatcgagctcggggtggcagggggaagaggggcagaagggggcgtcagaatgtcacgacgaaatgcatgcgtgcgccggctgtgtgcaacgcaacgcgcgcgggagaagagggcaaaggggaggaggaaacacggacgaacacgtacatttggaatattgcgagcacacacgggggacagagacgcgttccccgatttcgatttcactctctcggcgggtggtggatgagtgtgaggtgagaatggtcaaagtagattctcgcctcgggtcgataatgccgtcgtttgctggtttgatgttcgcccggcttgcttacttgctattctcgagttgtcgtcgtcggcaggagtaagagtgattgctgattaatgaaagacgtcgaacgtttggcccttgacgtgagatcggtagtggcaaccgaggctagaccggaagattatgacgagagtacagtggtatctgaagaaccgagtcgatcacgagaagtagcggcgagtatcggcttctttgtacgtacacaggatggccagttctcgctacctatagctattcgctgcttaaattactagctactttggtatcccatgggatcatcttcccgtacaccctagcacctcgcctccactgacgtcgcccgcacagccatcattggggcaagccgatcctctcccgtccatgtccacatgctcgccatcatcatccaccagcatcgcgcatcgtggtcgtggcccatgttctggtctcgtcttgcatcatcagcctccatgctcccagccacgccgcacacaccgctgcgttacaccgccccggtcggggcgctgagctgtcatctagcacctagcacccagattcacactactactttactactctctctccatacgacttttgattcccttggctctctctcacgtctgccacgttgcccgagctgccaactgccaactgccagctgatttctgcttggagggtccaagcccccggcgctttgagaagaagtaggaccgtccccattgccccttggtcttcggaggaatgtcttgcggtcgaccgagcgctcggcttgggctgtgccggattatcattcagctgcattcagagatcgttgatcgacagctcgacagggaattcaggcaggaaatgcttccgtaaagagtccaattgacgaatggagatttaatcgagacgcacagcctcattcccttgctctttctactcgccctcgttcccacgccgggtacattccgtccaggggctcggcatctcctttctagcctacgcgcgacacacactgccacgccaccgccaccgaggcacagctctcacgaccgggaaacccccagggtgcagcagcgacgacgcatgacctcggtcatcaaccccccgggtggatcggacttcaaagcaagccatctttctccccggtcgattgtcgagttccgacctgctcgatcgggcgcgtttcatcctcccacccggccttgacctgcgactcgctgtcgtccggctcggcttgggttcttggaagtagtggatgattggccttttcgcttggctatccaagaagggtgatcacacaatacccacgatcacagactttccggtgagagcagtagtgttgcgtagagaagagggttcctactctcggcagggtcccgttttccgaaagtccggtctcggtccggtcaacccttttcaagatgtttgcgtttcggggttcggtgattgtccaccatgacccccgctcttgcgatgaaaccgacgattgggtcgagtcgagtcaacttcatctagcttccagatacttcgacgtcgcagtgatactgcaagaggcaataggttttaggtgggattctaggtactttccctggctggggcagtcaaggagtgtctgaggcgtcggacaacatggggaagagagcaaatcagtctcgtgtcgatacgtcactggtttcgacgtgctagataggctctatcatctatgctgccagtacagagtgaaccatcatgcccttcgggaggtcttgagctgggtgcgcagggacgggaacaggcaatgacgagcctggcatatcatcaaaccagtgcgaacgaatgaaaacaccttgtagcctacttcgtcctgaacgaacaacgccccttcccggataaataaccggagtcgaacaccatcatcatcttccagatggcagtggtttcggatctagagtcctcccaatgttgaaccgaaattctcgtacttggacccgaggcctgggtaaatcaggttcgattagagatgacatgtttatgcttttgatgcgcgatgtggtggtcgagtcggtcctggcagcgatctgtacagcaatcatcctaacggtgcgaggagtactgacaaggctgatgaagggcagcaccgtgagggggcgtagttagctaagcgttggggcggcttgaacctgtcccgcaagccaagcttgagagcctccagtaagtcaagggtggtcgagtcatggagatagtacctgatgccaaacaagtacatccccctatgcgggccatccgttttgggaccgcgtcgcagagcttgatgaccactggtctagtgtgcaatagttggacgcagagggcctaaatagcatcgtcgtgttgacgatgatgacatacaagatccggccagggcataccacactggataagactgggaaattcaagggtacgcagcttttctcggcctttaccagcgcggagaaacttcgacggtctccatcgatactgccatttgattgggacgcaagttcggcttcagcctcagcgatgacttccattctacgcctattttgaatttggacgagagttcagtaatggccacgtatcttgctcgagtgctagaccaacaatctcaaatctgccgctcatgttccatcaagaccagctcacgttcgcggcatgaaacgtcggcggagattacgatcgtgggcgagctggtgttctggcttgcgcattcgcttgacccctccgggcaaagaatccgactcgtgacttttggatacggccttgagatacggcctgcggttatcaacccgggacgacaatcacgacgataggtcagagtgaaactcgacccgtcaaaaaggcgtgatcatggtcgttgaaggctagcaagatggtaagctcctggagggcttttgtcctacctttctcccattgaaagacgacgtctcgcacgatccatgctgagcacagcttgaatgtggcaaaaccgaatgatgcggcagagcctttacccgagggccggcgtgaaacccttctcagtctctcgtgcgacggcggagcaggcagacagattggcgggcgtcatttgcataggttattggttcatctcttcgcctcgtttcttcgtttttagtcatttgcaaaactttagatccctcaaacatcttgacgtgtacatgttcagagcttcgcgattgcttcctctgggattcagaaactggcgacccccttcgacctgcacgccgcgcaccgattggatccacgatgagtgactcgctcgacaagtattcaattctcatgcagactcacttgaagaattcgttccattgcgagtcggtccagctgctcgaaacagaggactcgaacagaccgttgaacacggctgaaggctggccacgagcgaaaagaggggatatcagtcggggtcttacttatatcgagcacgacccaagcagcaagtgcttaccgtgacgtgaatagcattctgtcggccgagcttgatgaaaaacttgagatcgtcggtcacgctcgatctgcacatgatttcagacgaatggatttcagccggtcttgatcagggacacctcctctaatccccattctgatgcactcacccagagttcggcgaagtctgtttcagggagatcaattctcggatctcgccgacgaccttgctagcgggacccttgacggcattctctgcttgcaagagttcccctgcgatcccagcgagctcatctctgatcccctcggccgtcttgtccttgacggggccgttgaaccatcggtcttgctcctgcatcaacttgacgaagaacgcccaccacagacggctcctttcgttctcgtccttgatgccagccaaggtcgaagatttaccgaaagccaggacagcttcgatgggataggtccctgaggggtgccaaggttgaggataaggtcggatgaggaggctgagtgatttggagatttcggtggagctgtccaagagggcgggtacgagacgctcgttcagggccagggtgattttcttgctgaatggacaaaggatatcgaggtagctatatggcccaaccaaaagtcagctgggaagtcttggtggagatatcgatcgggggggggggggggacttgcatctccaaggggttgggaccgtgaccaatcgtgtgtcctttttcctcaaattaagtgttcttatgtactcttcgactggacgctccgacgacgtcgacaatctccgagccgtccacgagatgaagacctcgctatccattggtacttggctcggcctcggcaagtttcccgcgagaaacgatccacgcgatccactttcggtatttcgttagcgcgcgccaatgacgaatgaaagggggaagacaccgaaaccttgctggtcatgttctccgactagtcgagagatgggacgaggaaacatgtgctgtgctcgtgatattgcctcacgagacacgatgaaaagaggtgatgtcgatgcggaaaattgactcttgcatgcggtaaaatgtctgtttccatcgcgctgtcgcaatctcgctatggcgcggggttgtctctgccatgagatatccgatgtcatgctctgatcgctcaagcttgatctcaagcctatcaagcaaagtttgctgattacctcggtacctgtcagactaacgctcgtgtgaagactattgtagtggtttcagtgcgtcggtcttacgccattccatttacgagtagacttcattgtgccggaaggccaacaggagagaattagctctcactggattcggaacctttggattgagcagtttaatgataatgatggatgcataatcaagccgaatgatgattctgtctttgatgacggcgctactatcatgctgttcaaaagcaggaattgagaggtccactgcgcgattcaactctcagggactattctatacccatcggaagtcagattcaatcagattgtcccgtagatacatgaccagcgcatgacttaccaaatccctacagagtcacccgggcagccctgcacacctcatttcccctccattattggccggccagggaccgccagccatcgagggctatgcatgttggcgagcgacaccacacgatgacatcaaaggcaaacggataaatttactctagcgctttggccgaatgagaactccgcccggctcgaaccgggagctgcactcctttgtaattgattggaactgacccccgttgtgctatcccctccagctgaatacggtcagcgggcaaagctagacgactttaaagaagtccacggctggcacaagcaaacgaaaagcagagatttctagattgcagaagcttggctgaatcgtttttgaacaggagcctgaaaggcggagtatttccccgaatccggaaacaggtcgagaaaagctatggagcaagaatctctcgcaccctcacctgggtcttacaatgaccacaggaattgtggttcgtatcagagattaacacagaacagcacagaatctccacgatacgatcctagcactacggacgagtgtggcacttactggccctctctgcgaccggacccatctaatgccccattcttcaatccgttcagcgcaaaagacacgtttgatcatagtggcgaggggatattcctattgggatccccccaaagcacagacgtccggggattttcctctgccccagaatctgggatacctgacctgttggctcttgatctgggggatcccttcgctttcaaccaagctcagtcacgtgtcgccatcccaaagtccgcttctcaggggcgaggtcccctgtggaggcaagcacgagcggttactagcggcaagattcgacggcgagacccgtccacccgtaagacaagattacgtctcagaaatggtcaagctctcaattcggcaaacccaacttccacgtgtccgctcaacaccagcgacgggcccgatgcaaccttgaatcttgctcatcgacgtacctgcgatgacctagctgaaggcaaaatggccgattcaggttactggccaccggattctcctccaccagcctatggaacatgggcacagcctccagggagactctagggaccagagccgatgtcttgtgtttgtgttcgcctcgatgagctagacgatcccgaacgttgctagcgaaaacatgtacgatcgtcaaatgccatacctctgtcaatttcagtccggtccctagctttggaactaacgtatctcaaacctaacgcaacaacatgagctggtccccctcagatgagcctcattcacgaagcgtctgcgctggcccaacaaagtgtctagctaagacgagatgattcgatcgagcgtcgcgtagcgcttcgtttatgcatgctacaattccccacactaatcctgatccttgagcgacttgacgtgctctcccttctttccctgatctccctccttttgtagtcgacgtctgcgagatcacgatccggtcagcgtcaggtcatactgcatccattttccaagcaagcttaccgcttgacgtcccactgcatacgataggaaagatgcgaaaaccggtcagcagatactccaagacgagatcagtccgctccgcgctcacgttgtgtactctggcaaagttgacttccatcacggtgacctgttctctaaggaattcgagatcttccttgatattgttcaagtttttcctggccgtggacaatttctcggacaacagcaagacggcctcttcgagcgggtacatcaacatcgtgttggcctgcagacgtttccccccgcgtgtcattttctcatcagcacgcgaccccttcgaaccggatgtcgacctgacagaacactcacacccaaccacaacccgacctgaccgtcctcctcgacctcggcctcggcgaacaaggtatcgttcaactcgtacaacgtcttcaacggcttctgacccgggatcttgccgctcgcgagttgttcgtcggaagcttccaactcgttggcctcggcgagaaggtcgtcctcgtcctcgtcatcttccagatcgtcatccaggtcctcgtcgtcatcctcggcttcgtctgccgattcgccttcgtccttgggaacgacggtgggcttggtgccgagacgtttacactgccagtcaagtagaatcgttcagcactgatgagcttattgtgggtaactgtccaagactcactcgtcgagcttccaaaaacttgacgaccttcaaggtctctgcgatgtcagggatcttgctctcgataccctttcgacgggtctgcaagctgacttccatgtactgatacttcctatcatgtggtcgagatgcacaggggtcagtggaggtgatgtggtacggtgtaacggcgcgactcacgacgtcatctccttgaaagagctcatgatcccctcgacacctgcatcctgaccgccgacaaagtcgtccacgttggtctgtagctcggctcaaaagtaacatatcagctttcaaagttctattcactagctcgaatcccaagtctgactgaccacgaacggggcataagggatacctcgcgggttactcttgtcgatggtatcggagtggatcccgatggtcgcgatgccaccaaaggccgcttttggcttgcttgggccggcgacagcgttgggtccagacatggtaccgaggtagattctacaaggatctgtctctatattggtacccgctgttttggccgacccgcaacccgagagatgtatgagatatcatcatcaacatctcgcaccagacgtcgctggatcttggaatgacccgacgttggcgcgcgatttcacgtgaacgcgacctgaagctatccatcgacgccccttgcatctagtggttggtggtcagcccgaacccacgtcgagcattgatgagctggtcgaatgaatttggtagaaggacaggagcttgggatgatgattctggcgggaagaggtgacacagcgttgtgggggaaaggatatccccgccatcttgacccaacaatctcgaaaggggacgagcctaaacccaacccgaatagaacgattgtgcatgtaatgatatatatatactcttcatgatcgtcatgaccggtatgagagaacaggcagaagggcagcttgaggaatcgaccagcgtcctcgtaatcagcccttctcaacccgttccttgtacgtcatgacgtttggtcgtgataccgagcccgaaccgggtcctcgtgatacatcgagaggtcccgttgtgaagaccctattgtcttctcctttgatgtcgttagtgaggtgtgaaaaaggtcgtaatcccataaagcccagaaaagtttccgaaagccgccgcccgttgaaccaaccgtagaagggtgagcctcctcttagttgatgatagcgacgctccaatccttcaaccaagccgtctgatcctttggcgaggcccattcctgagcgtgtccactatcatccaggcgttcatctcacgatcagcacgttgctcgcccatgccgtcggtcgataaggggggggggggggggggggggggggaggtggcgcatcatcgtatgcatcttgtctgaccgcactccgtgatgcgggcggaggaggcggagcctttctcttagtcgtaggcgcagccggtttctttacggcggcctgggagtcacaagaacgacacgatttagacacaagctcgcgggttgacaaatatcgtcggctacccaccttttcgatacctccttgctgagcgacaaagtctttgataaactgctcgttctcctgaatctgctcagcgctgcgtcgtcgaaaggccgcgagaagacttgagcggttgattgctggatctgcgtcgcgggtccggaaactcacctgacaccctgcattccaagctgatcgaggaggttctgccaactaggatccactccgacagatgtaaagcctttttcattatcataacccatatgagccacatgttgaaacgattcgcttttctacgaatccagattagtacgatgagcgtccgtcggtggtagtgtgcgtttggtttgccgaactcaccggtgcagagatggccgacttgtcgatcttgaagatgttgttgaacctgctcctcctcttcttgtcgggagacttggctgctgcagccttttccgccggtttcgcagcagctgcaaagagatggctccggtcaatcgacgctccgaaagctgtgatggcttgcaatcgtactcacccttcaaatacttccctcgcttgctgaccttcttgtagaagtcattcgcttctacttccgaagcaaagacgaaggctacttgcgagttctgcgaggtgagcgagagagtcagtgacaatggattcaacgcttgcgtgaggtgtttctcacatctccgccgaacgagtggaagaaccctcgatcttggttgtactcgagctccaagggaagttcatgctcccagacgataccccgagtactctgtgtcgagatcataatgatcagcatcattccgttcatcaggatgggatgctgcgcagagtcactcacaatcaggtcaacgaccctgaaccagagaccccctttgaccttgtcttgacaaaaggtcaacgctccctgaataccagtataggcccagctgagagaaccagcgcaagtcagtcgtgcagcctcttgtcgtccgttgactgaatacttacgaagactctccttgggtcgcttgatacaccctcgcaacggtcgcatcgatgatcttgttgctgccgctcaagcactttttcacgcggctcttgtcctcggtggacaatgtaccagagggtgccatggctgtgatctggtaatatttacaagctgaatcttgggctgcaagtgcggatgaacgatatgtcgattcgattgactcgtttctattcaaagtcgtccgaggttctgggtcggtcaagaagtgaatacgtcaccaacggggttcgggggaaacgcgcgatcaagttgcgagtttcccttctcgtccgccgacgggatacaaaaggtccgagctgtggtttacatccaaacatgcgtctcgtctgatactgcttcacgattcaatcaatgagggaacgtggctaacaaaggagggtgtatttatacgaaattcaaacttctactatcgttattcaaagaaagagaggggggggtcgtaaaggtccgtgtcgttcctgcgatcgtctttttccgcgcatctagaacatggtcaaggcgagcccggtaaagacagtgagggcgccagctactatggggattttggcgtcgacgaatccggcgctcttgttatcactgccactgctggatccagtaccggctgaagtgctcgaacagatcttgttgtccttgttgagcgaggctgggacaaagacctggggcgcgccatcctggacaacgacgtcgagggacttgtcgctgttggtagtataggtcttgcatccgatgacgtccaaaagctgtgtgttgccatcataggcgaggttggagaccttcatcgtgttgttgcccgaaccggcacctcgattagacaagatcgacagcatgggagctttggagatcacgatcgcgttatccgtcgagtcgacgatcgacgccttggtggtgtagaacgaagactgcgattggccgacgacggatcgggccgcgttgagcttgccaaagtgcttgtacatgtcggtgttgacgtcgtactggctggtccacatggcttccctgttgaggtaatcgatttctccaccggtaaagccctaccagacgtgacgcgacgttagataacaacgacacgagtctcctgtccgagcctatcgactgacctgctcctgcccgtagtagacgtaagggattccgtcggtgacaaaggggaacgtggcggcgttcatgatcaacatcttgtcatccacggtggcctcgaatcgggaattgtcgtggttgtccaaaaagttacccaggatggtcgtgtcatcaaacgtcgtggtgagcgtggtgaccatttccgacaatgcgctcatgtttccgttagtcgagttgaaggcggccttgagaggaaagtagacggggtagttgaacaggctgtccatgctttgcttctggtaagcggctacatagggagggtaaccctcgaggacctcgccgacagcatagacaccggcagattcgacaaatgcaggccaaaagtcctgagcggcattccgatcacatcaccggtcagtcgtcgtgcccaacggtctctgagcgatgctgtactcaccttgcggacgtgcttgacagtgtcgatcctgatggcttcaaatccgtaatcggcgaccagccccttgatccacgagttgaaaacctggatggtgttgggatcttccgtattcagatcttgcaaggtgacatcagtgttgccgagcgagcactgttcgacgttggtctggttgttgtaatcgtctacccagcagaaaggatggtattgcgcggtactgttgaaaggcccgtacgagtcgttggggataaagttgcccgaactcgtcgccgcgacgtggttgacgacctgtccccaaggggtccgtgtcaacgtcctcgttctcgacattgagagcgatgtgaattcactcacgacatcgaccatgattcccatatccttggacttggcctggctgatcaagtccttgagatcggcctcgcttccgaacgcttcgttcaatttgtaaatgtcctataaagcatcgttgcatcgtgctctcgacgtcatctcctgaccagatacgagacgttgtgcaatactatccgactcacctgcgtccagtaaccgtggtaagactctcctagcgaggtgttccctccgatgttctatgtaatcatggaccgagatcagattgctggcccaagtagaaccgaaagacgcattcgagactcaccgagacgatgggcgagatccagatctacatgtcgcccgatggtatcacggaccaagggaccaaaggggcgatgcgagttatcagctctcatcgctccatctactctgtcgtcactcatctaggtccgctggacactcacgacgtcgaaacccatacccttgatgtagtcgagcttgccagcgagacctttatacgtcccaccgcaatagctcctaagaacgcgcatcgatcgagactggtcatcagcccgctggcatctcggtcgtcctcccccggtctcgcaatgaaacggaccggacgggatgagatcccagacttacatggcagagacgtcacacgccttggtcgtcgatccatcgtccagagcgaaccgatcggtcaagacctggtagacggctttgctccgcatcgcatcattgtcgtacgcctgagcgagaccggcgagggagacgacggccagggatccgagcgtcgagattgagagcatggtacgtggtggtggtgtcttttatgtgtttttgtatggggccgggcttgcgagtttatgaagaacagaaagaccaggccagatgtccgggtgtgttggtttccaggtgtggattgtgtgcgtgcgtgggtattgctgatttgatcaacgtttggatcgaggtaggtagccgagtcgtaggagatgtttacgacgtgatgggtagtgtctatgaggttgcactactgctattgatttcgggaatgggatcaggcgagactatcgaactgtatggatgggacgttggtcgtgaaacgatggaatgttgtcgagtctggttgctggttgcgttgcatgcgttcgacgccgagtaggtagctgactcaaactttgacaacaaaaaagtgtgatgcagatggatcgcgttgcactcacccaccacccttgcaactgctgccaaggcttggccgcacagcaaatctcgtcatctcgttttcatcatcatttcgcccctggcccacccggagtgtgtgatttgttgagacagccgcatcgggaaggagggcgggggggagtgactgtatatctcatggcccgactcggaccctcttctcacttgaatattcatcataattgtcatcgtgaatagatatgctgacaaccgatcttgccaggtggcaatcccgctgttgccatgacggcagtggcgcgatggcgatccgatcaattccaacccgaccgtgcacaatcagcttcgaatgtccaatcagctatggggcgacgtcgttcggatatacatagaggagctcgatacgacaaacggatccgaacatagatcgccatcttgtcggagccttctacatataaacaggtcaccgagcgcaagcccttcttgcccgcctttgagacgcgaaacatcgacctttcttcgtaaagatgccggacctcgaggccaaaatcctcgtccatttcaaggacggtgaaccgaaactatatctacgtgataccttgatgctgaggtaggtacacgtaggaggttgagattgcgcttgctccggggctgattggcgacaagcgccttttgcgactgtgaacccagcccggtactgcgacacggtctgcccgaatcgcttcccggcacagaacctcccgagatcaagctcgaagatgaccgggagagtctgatacttcttttggacgtcctgcagactttgatctgtccgtcgaagtatactattaatgacaaaggacaggtggagcggccagaaaagcccctttctagcgtcgaccgttgcaaggagacatcactcttggcgagcaaatacgatgttcttgcaatgtggcagtcatgcgtccgtgaatacgccacgagtgaactctaccacccagatatatggaatcggcttcatttaggatacgacactcaagatcgcgagctcatcctccctgtcttcagctatatttgcaagaccacgctcaatgagatgccttccacgaagatagagcgctttggacttcaattgttggttcaggctacgacaaatctatggacccctctcattcggcggatccgataaggtttgcaagcaggtattggaggagggcctgggctgcataatcaccgactttgtcgtcgagctcaagtagtgcgaatcctgcaacacgagatcgagtcggcatgaaccgctcctgcctgcgcaaaggcatcgagtctctttcactttgccccgctgccaaagacgggcggcgcgtgaacttttatcgtttggtcgattgtatatacaacgttgcggattcgatcgcattaaagatgattctagtctttcccggccgcggtttcgtgacggctcgaacatctatgcagacgccagctcgacaatcaagcgacaggcgacctctaggaacaagaacggactgcagacctctttgatcttgccttcgaccgtctcgctgaccccacccaccccggcattgttgttgttgttgttgttgacttctcgcctgatcggcgaggtggcagcggcgatcccgtctgtgctagacctccggctttcgagcgattcggcaatggtataatcggtcgcgttcgaagatcgtcgatagagagaaaagtcgtccgggtcgttgttgctgcggtagtacccaacgtttcggaaatcgaccagatagttggtgccgtcgacgcgatagagttgcaagtccatacggatctgcaacgatcatgcgcgtgaagaggtgagcgggattgccgacgacgacgacgacgacgacgatgtagactcacgacgacgttgtcaattttgcacctcgtttcgacaaaaaacagggactggttctgcttctcctcgttgaccttttccttttgtttctgctcccgggtcattcccgggggtgtctcgcggatcggcttgccgtcctgatcccaaggtccgtcaaagcattgtttccgtttccactgcatgcccagtacctggagggtgttgtaaatctcgtgcatgacctcgatgggcggggatcgggaccggatcccgaagtgccatttccccttgctcgacttgctcgctcgaccggatatacgttgagcggcgacggcttggtgggcggctttgacggcgtcttcttgcgaggtgagggattgggattggagctggggcatgtcgtaggcggggaaaggttcgccgttttctgtgcgcgagacaaggcgctcgtgtcggctctcgtgtcttccgtccgccaaaagaggtaggccactgtgacctgccacgcgcaagactcaccatcaaacttgccatggagactgctatccaagatccggaagttcgaatccggaatatcctccatttccatatcctcgtcttcatcccatgattcgtcctcgttaggtcccttgttggtcgatcggttcttgatcgaggtcgaacggttgacgccttgttgttgctgcgaggcaggtgcgacgggacggcacaggtcagtctacgacatgggtgagtaaacactccggaccaggatgtgatgacccacgctttccaatccggcgttccagggtggtggcgacgatgccaagaagctctccatgacatgctcgttatcttgccgcatgtcggtcgctggcaatgtcatgtcccggcaagaaaaacacgtcagcttgtgaccctctccgcgccgtggccaggaggtcggtctcccagccctggagtgtcacacactcactatcctgcaacatgcgcttgtgatccctgacgagttgataggccaccttgatctgattatcgccttccctctttaaagcatcccagatgctattcctatcgaaacctgccatcttttcacacaactcgtccacgatcctcggttcgacgacgccgaggtcgggaacgtagacgagtccttgggtctctgccaccctggccatctgttcttctcccagttcggtcccgctgccggtcgtacccgtagggaccgcaccgatcccaccctgggcgagcagggccgagacgtcttccccctgggtctgtccaccgggtccttcctccaacccgggcgtctggggtagtggttggaggtactgtgggaggttcgtctgaaaccatgccgattgcctgatcccggccgtggtgatcctcttgacgggatcgacgacgagcatgctcttcaacaagctcctcgcgtcttcagagaggtgggaagggaggtgatagatgccaccgttgatcttttgaaagagtttagggatgtattcgtcgtcgaacgggagtcgaccgcagagcatgacgtagaggatgactccgcaggaccagatgtcgatctctgggccggcgtacaacctttcaccgcagggaacacgagcggtgtgatcagccggtgtgtcgttggaatgaccacgtcgtcatggctggacgacgacgacacggcgacggcgtgactcactttccactgatgacctcgggagcggcgtaattcggactcccacagctcgtcttcaagaaatccccatccgtcatgatattactcaacccgaagtctccaatcttgacgttcagataatcgtccagcaacaagctggcgcgtcgggggggtcgcgggttcgagtttgagtggttggacgaggcgccgatcagccaacggggtcgtcgctcgctcgccggatctcggactcacttttcgggtttaagatccctgtgtacgatcttgtgtcgatgacaatactctatggcgcatatgatctgctgaaagaacctcctcgcttcggtctcttccatccttcccttgttgacgatgtattcgaacaactcttgcccggcgtattcgatgaccatgatgatatccgtcgacgtcgtgatgacctcgtacagtttgatgatatgagggtgacggaggactttgaggtattggatctctcgtttgactcgggaggtcatgtccatgtgttggatcttgcgacggttgatgatcttcatggcgaccttgtggccggtcatcgaatgggtagccactgacgcgaggtttccgtggaggggtcataggcgggtgaggaaggagtgaatttgtgttccggttgatatcagcggtcgggtccctgactgacgacccgccctggactcacgcttgacctttccgaaactacctacccccaacgtcgcgccgagttcgtactgcccgatcctgatcgtcttggccgggggtctttgatcccccgaggatcgtctcggaggcacggtacctgtcctgctaccttgctgttcatggtgggtggatgaaccttgacctgcgttgggtgggagcgatgggggtgcacggttcggatggaccgggatgggtcgaggtcgaggtggtgcgggtcgtgtggcgtcgggcatcggggaggcgttgggggtgggttgggtgaatttctcggcaaaccctagcgagttgaccgagatccatcgttcgcttaaagttccgatcatttcctcggtgacaatcacaatcatcatgatcaccgaaataaaacctcccgagcacatctaatcggccagttttatcgtcaaccaatgcagacatgaggcggggacgggaggggactccagtctacttccggattgcacgggaagggtcaacgcacggctaacgatcgatagatggacggattcgaccggggatcgatagtgtgacctatgatcagctgtacctagagaggatataacggtgagatcgacaacgaatctgactctttcccatctatccgatccgttcagactcccagctcatcacccgaatcaatcctctattcaatgccgaccacaacaatgatcaaccaaaccgatcaaccgctcgctttgggaatgcatccgaccgacattgttgtcgatcacgacaacaaacacgacgatcttgccaaggaagaggtcgtcgtcgcaccttcgctgtatgaccagaccacccacctcgagcaggaagatcaggcacctccggtcactaagaaggaactatggtgagtcgctcgtttccaacgagcatgaccggggtcgagaggcttacgacgtcgacattcctcttggcaggtcttactgtaagcgagatcgcgtgacgaacggccgtcccgggtttcggaaacgagatctcatgagattaatcggcgtttcatcttgctacagacctatactatcagggagactgcggaacaggacctaatggttacgctcctacccagtttcaaaagtaagccgacccaccgggtccatcgcatcctgcacacgtccaagctgaccaacgtacccctctcgacgcagcctcatgtctcaagcctcttactcgcttgcggatggtcccgccggtgcaggccaatgcaaaggagactcggctcactgtttccttccctttggttctggcgaacgctccgtctcgtccgtcttcctcttggccaacgggatctcattcgccatcatgaccctcggattcacgacctttggcgggttgcaagattacaagacgtacaaccggtggttcttgatggtcttgacggtcatctgttgggcaagttcgttcggtttcctggggctgaaggacggcagtgattggagagcggctatggcgctatacatggtgggtttgtcgtgtctcactcattggtttgcggtctagactgagaccgtacaacgtcgcaatcagatcgggtatattacctacggagccaccttggtgttttacgcgtgagcatatgacgtgctcttcctcgctagcgatccctgctgacaccagcttgacgcacaacccatagtgccatcttccctcgactcgcccgagctctgcccaccgaaagagagaacagggagaagctgaggcaaggcgaaatcacgtacgaggagttcgagacgaggtcttctatgaacaggaacatggtgtccagcatttctaccgcgcactctaactgggtgagtagattgaattccgaagcggattgctgggagagcaatgacactgacctatactcgttgctgccgcacgcactagggttacctgctcacgctctccttgaacctgtccatcctcttacccttggcttcctcaaaccaagtcaacaactatgtcatcgccctctgcactgtctactggatcatcctcggtgtcccttggttcatcttccagaagtcccgtccgggtccggaccttcccaagggctcaaacgtggtcactgtcggttggcaacagattgtcgtcgcccttaaggagatcagaagattgccccaaacgttcatctacctcggaggcttcttcttgcttgctgacggcttgaacacgacggggaccatggtcaacattgtgcaaaacaacaatattgccttttcgttcttggactttacctacctcggattggtacaggccggatgctcggtcacatcgctctacgtgttttggtgtgagtgtttcggtatcgtcattggtggggaaatggaatttaaaatggattgctccggctgcgatagacatccagaggaaatggaggctcgacaccaaggtcatgtttactgtcaccaacgtttttagttgcttgatccctctttgggtaagctcggggtgtacaattcccagtcctaatcaaactgacatgggtttgctggcctaccagggaatgatcggcatgtggaccgacaagattggctgtaagccacgatgacgaaatcagtaaacggtggtgctgactttattttatttcattttattttattttattttccagtccacaaccgatgggaattctacatgtacaatgccgtctttggattattccaggccccctactatgcctactctcagacaatgttgtccgagatcttgcctcctggtgcgtatcatttgaacgcgcgccgccgtccaatccaagtccccacctcttacgctccatcgtctattcaggtttcgagggtacctttttcagtctctttggtttgaccaaccgtgccagctccatcattggacccaacgttctttctgccagtaagtatcgaccgttgcaatgttctagtctgaagccgcgctgacatcccatacgcgctgcctccagtcattagcgcgtctggcaacaactataccgggtttgcctttctctttgcgctttgcaccacggctaccatcctcttggtcgtctttgtcgacgtcaagaagggtcgatcggatgccctagcgtatgccgagaggaagagggccgagcagcatcgggagaaccagcacatcgagtgaagggagcggtgtggatggatctgcgacgcaagggggttcccgagcgtggtcttgtacgcattcaggtcaaggaatagtgcagtcgaattagggtcttgtatgatcgacagattttctttttgtagaaatgcacggatgccgcaatgtgatgcatcatgaatcgtcctggttacgctctggcaagcgcgtttaacgaagtatcgtactggagtcccaaatcgacacatggcggatcagcacacttaccatgtgctacctcttgtcgtctgaaagtcctcacttgatggccggaggagggagaacatagcacagcttcgggctctagctctggcagaagtgagacgctttgcttttctgtcgtttcggtgttcgatccagacatctagcgtccataacaatgtgcccatgccgagtacatccgagagagacgactctggttggccgtcaaaagaagggcggcgactcgatcctgaggtttgtgaaattgacccatcgatgcatggcaagcgccagtcgagcggcgcactgcggtcgacagcttggcgaccggccctatcgatgacctgactgaactaagcatcccccatgacagctgagcaagatggtatttaggtcgggttcctgcctctaccaccatgccaaccaccgcggtttccatcgtagcatgcacgtggatgacccccctcgtatgtattccattttcacaaagacaattctgatacatggttcctttcccaatgtccagctgaggcgccatcgacggtgccgttcttttacgaccgatcttcagcgtcgatctctccgagcaacatctgtccgtctttgccaccggtcaagactatgatggaatcgccgagtcagctccaactcgcgtggactccatcgtgggagcgtcgcgatcactcactgatcggttccctcggatgccaatccaccgctccgaccgaacctttatgtcctccgagtttgtagaggatcttgcccgtctcgacttcccagacggtgacggtcctatccccacctccacaagcgaccctggcacccccgtccgtcttgctccattgacacttgatgagcatctgttcgaaccccgagggcgcacccgtgagggtccggtagaccctggtggggtccgaggaaaagggccggacgtcgtggatcatgagggtcgagtcgagcgaataggagaggaggtgatggccagacggggagagggcgagcgaggcgatctgcgtgaaagagggaagcgtggccgggggacggggagatcagaatccgggggtctcacaaacccaaactcagaaatcctccttgtttccccaggtccaatccggagctgagcagcctcccaacctcgtctttaccgaccaagctgatcccgcgatcacgagcaagttcatccccgaccttgtccgaagtcgcacccccggccgtcgaacccgggctgtacggtgagcccgtagcagtcgcgctcctcgtcctcacaccgcgacacgtgagttcaacctcgaaatcgacttcgagctcgagcttcatgtacttttcgctggcaggtcgatcttccagctgcatgagtgcgctggaaggcatggatcggaccctggtcggggtgaatcccgtcgaggcgggcgacgaggggatggcgcgggtggacgctgacgtgctgcctgaagccgagggcgatcccgcactccggggcgaagaggcagatgcggcagcggaaggatagctgggggtaaagccgggaaaaggaccgttcccgaggacggaaagggattgtcgtcggtgacggtcgatcgagctggacgcagcaggtagtcgacgagcggtgccatccgagacggctccaccgcttgtaggcaccgaagcggcgcgttgattacgatgttcgtcggccaagggatcttcttgaaactcgggagccaacgtaggactgggtccgtcgggtttggcacgcttgtccggggcaaaaggcatcgtcaatccatctccacggggagcggctcgaaggaaaccgggatgatcgtcgtgttcgtcatggccatgatgcgagaccgacaagacatcctcgtccaactgcatcgactcgatcggcgtgccgtcccaagccgtcaacgacttgaagcccttggtgatgggagaggcggtcgaggacctgctcgacatgtcgctcgcacgctcgaatcgtctgtcgtccttgctttcggcatcgtcgtcattgtcggcagtcagactggacttgaccacgatccatcctcctggaatccccttgtcgctggcttcggcatcggtgtcggtctgcttaccggacccgttgtcaaagaggctcaatccgagccatttctcgagcacgtcctcgacggtcccgttggccgtggcggcggcggcttcgtcgacgcttccgcccatcttgcgctcggccttttcaaactcggcggccttttcctcgtcgatcggcttgaggagggtaaaggacaagctcttgcgacccttgacgggttgacgacgggcatggccgacgcccttggaagcagcgtcggccatggccagcaaggcgtcggtatcgtcttcgccctcgacgtccatctcggccgaggtggacgaagacgatcccttggtaccgtaaggcaagagcttgtcgaacagggcagccgcttcggcgttgccgttcgtgctcatgtggaaagccgtcgacgtgttgaatccgggcgttcgtagatggggcggtagagagaatagggcaaaggagaacaatacgacctgcgtgtgggagcaagacgtcagctactgcgatcgacgtgatgggcaaaagccgaaagctcaccatcatcaggactcccttgctgtccctctgggtgcccttgacgatggccttttcccgccttctcgcctgaaccatttcacgtccaccttccctgtcctcgtcgtcgtcctctgcctcgtcgtccccgtcatcggctcgctgagcacgttcgatcttgttggacctgttgacgctagccgccgtggtcgcggcagcgtcgagatgacccgtcacagagagttccatcaattcatcctcgtccgcgccgtcctcgtcatcttcatcttcgtcgtcgtccatcgtatccagatcggccatccctcggatcgccttatcgacgtcttcctctctcctggcgttcctgagcgacgaagggggatccgagacgagacccgggttgatcgtcttgcccgctccgagggcgaggttgctgatcaattgatcgtgcttgctcttccagatccaaccttgagcctcggccgcttcccgagccttgcgttcgtggtcgacctcggcgcgtaatcgctcgatcaacatcttcatgccctctttttcctcgtccctcccgatcgagcccgtcgaactcatgacgctacccccgcgtgccgacctggcagcgtgggtcttgcgcaaaaactcttcggcgcccatggaagcgtcgtccccgtccccgccctcggcaccgttcgtcacgtccctcaggcgttccctcaaccggttgacctcgtccatcaacccgcccaagagttcaccctttctcgtcctgctcctctgcgccgacgctcggttcttgactttacgtatctcttctttggtcaggttgtccatggggggcaattcgacctctccggtcactggattgatgcacgccgagccggaggggaggtgcgaggatgacggcgaggtgttccacggcttgaacccacctggcggggggatcttcttcttcttccccgccgatccggatttgagacgaggtttcccgtccttgtccttgtgatcgctccccgacatgtccccggcatccgcaccacccgtctcggccaaggagaacccgttgacgggctgtaaccccgtgaaaccgttgacgaggctcaacccgctccccgtcggactgtcggcatcagggccgaggtcgagcacgttaccgtccctgagcccgagcaggccggggacgaacgagttcgggttcgattgtgagagacaagtttcgtccccgatttcgcccaattcggtaccctcggcgtcggacccctcgtcatcctgatcctgttccttggaatcgacgagatcgaccgcgttcttgctgacggcctcgtcgtccgtcccctcgctcgtcctagctcgcttctttggccgtttatcctgcgccttgactccctttttgcccgtcgcgcccttgatatcgggtgagaacgtcgtcagggggaaagaagatcctgcgaggttgggtaacgaagccgatcctggccagagggcggaagaggggatgacggcgggttgcatgccctgtaacggctgctgctggttttgcgtgtgcatgaacgggtgggcaggttgacccgtgtggaagggcaggttggtctcttgcccaaacagcttgggagggttgatcatggacatgctcaatcccggtccggcaaacgagtgagacattgaatgagcgtgagcgtgatgttgtagtggttgtgatggttgagtgaaatgatgctgccctggttgagacggatgggaaggcatgttgggcccgaaaccgtgtccgaaccctccgtttccaaagtgtccctgaccctggctctggctcccagcgaaaccggtagcgaccgaagatgaatagctgccatgctggaaatcgtgactgccgtcgacactgtgttgctgatgaatggggaatccctcgaggtgtccacctgcaccgacgatcggccgagcggtcgagggggtcaagaggtcgtcctcgcccgggtcgtcaaatagccgcggagacgtcgaacggggaaggtcagtctggacttggatctgaggggttgaagagggaaaggtcgaactaaagtcgaaatctgagagataagacgtgggtgggaacaaaaggggcatcatgccggggaagcatatcagggaagacgtcatcagctctccatcgtcggggggagacgctatgcgaacgaccaccacccaacgaccctcgactcacctccagcttcgatcgactgccaatccatcaacccggtcgaaccgtcctccatgccatcgactccatgtaccagcaacccatcgtcgtcctcgtcctcatcatgatcgagcacgttcgatctcgcgagtcctcctttcttcccgacggacgagcctgactgtcccgttcgtttccccgcggtcgatgtagtcacggggacggccgatgagagtctcggtgagaggtgagataatcgagcgtccgagatggggatgtcaatgtcgtcgaaatcgagctccatggtgcagaaaggtcaaggctccctttggcaatgttgagtgccctttttgtttgagacgattgggggccagggggggggggggggaagaggggggccggataccgaggaaagaccccccctgccccaccccttccacctgccactgaccgaaggcttctctctcccttgaacgcgtccccgacctcgctctccccttctctctctcgcccactctcgatgcatcctggcgatcaaaccttgatccatcccggcaacgcgtgcctccactttggacagacagacagttaacccatcgtaccacctaccccctcgagagcaagtcgtcagagtcgcccaaaaggtaatcaggtgcaagacaggttcacgagcgcacgggtcgtctcccctgcgaccgcaaccgcaaccgtggctgtgtctatgcctgatcaaagatggtcgatcggctgatcgggacggtcgatcgtgcattgccgggccggggcgggaagcacggagaggcaaacgaacggactgatgatccatgtttcgaaaagcgcttcgaacgctcaaagcaacgccaggactggtggcgaggccgcgccgccgactcgctcgacctgcatcgaatctcggcgatttcgataacagtcgcaattcccctcgaaggacccgacttgtggatcccgttcgctcgcctgtctaggttctctcgtaacaactatgataagataaccagtcatgctcgtccgtgcatgcatcgttgcacgtcatacaataaattcccctgcgacccgaccccgacgtctactgcgtcttttgcttcttgttcttctcctgctgatcgacctcgccctcgtgcacgtgctcgggagcgacctcgtccacctttcgcttgccctcccttcctaccctttcgatcccacccatgacttcctctgccacgccgacgacgtcctcgacggtggacctcgtcatccccttgccttcctccatcacctcgtccaccagggctgaaccgacctcgacggcgcgctcgtacacccccttggcccggtcctgtgcgctgcccaccaacccctcggcgagctgggtggtccgtccgagatcgtccgcgacgccttcgagagcctggacgttattctccgtcatctccttgccctcctgcatgacctcggcatagacaccctcggcggcttgtttcaaacgggtgatggtctccttgacggtatcctgaccggcgtgttgaagcctctcgatcgtctcgcccgccgaacgcagcgtgtcgtccatcttgtgtttcaagtcggacgcggcctgttccgcgcgctcgacgaggtccttctctacggcctgggcggtctggccgacttgctccgtggcagaggatacgttgacgctgacttgatcggcagcggcagccagtgcggattgggctcgaccgccagcgtccatcaaggccgcttgagcttggacggccttttccgccaagacgtccgaagcctggtcagccttgtccgcgaggacgtctgccaacccgctcgcctggtccacgacgacgtccttggctttaacagcctgatcgagagcggcctccttgacttgaccggcttgttccagggcgacctccttggccttgtccgcctgctcgatgacgacctccttggccttgcccgcctgatcgacggcgacctctttccccttgccgacctgctcgatcgcggcatcgcccgtcttctttcccttgcgcctgaccatccccgtcaagtcgttgaccttgggcgcgacttgctcggcgacgaccttgcgtccggattcgacgaccgagtcgaccccgctctggacggccgagccgacgttggcgggaatgtcggtaggggtgttgcccaacagatgagcgacagactcttcgacaatgtctcgttgctgtggcgaggtcttgaggtcttccagctgaggcgtgagatgagtagatcgggtcagcgaggtgccgagcgagacgacgggacgaccctcgtcagtcctaccttggcctctagatctcccaactgctcctgcaaatccttgctcttcttctccctctcttcatccgtcaacttgaccccagcctcttgccccttgcccttacccttgcctttccccttgtccgcgaccttcttgtcgggatcctctccggcatccacgatccccttcctcaatctcacgctctcgatcgccgacctgacattgtccagcgcttcttcccgcttgtctggaatgttttcgaggacgatggcgagtttatagtgagatgctgcgatttcgcgggaagaagcggggagcgtcgagttgtacgatttcaatgccgacttgtagtcctccacggcttgaggaaagttctctgtaagggtagggtcataccagacgtcagtaggaatcctcgagatttcggaagcgttctgcgggacttgccgttctccaaactgacatcccccaaaagaccgaaacactctcccaactctctcccgacctcctcgccctgctctcgacgcttctcgtacagtatccgagccagatcgaggatctcccaggcgatggtgaaatcgtcatcgtccacctcttcttcgggtccttcttcggcatcgtccgtctgaggttgagcttgcgcgtcggatgggccggctaggaacagtcaaggtgaggcaaggacgtcaacctggagctcgacctcgggaaggggggtgtgtatgtgtgtggctagcacgggtaaggtgagacctaccttgttgttcaccctcttcttcttcttccttgtcctcggcaccttctttaccgagcactccctggttctcgatggcgatctctacgagggcctttccgtacggtaagagcaagggagccgattccggtgccgagtctccatggatcgaccgcctggggaagacaaacaggaatgcgacggtcagtcccaagtcgaaccgggatgccaagtccatggggaacgggtcgaaggtggagacgacgagagacctacatgatttctagggcggcggcatacttttccacggcaccttcccagtccgagagggcgagagctttcttgccctgttcgacgagctcgtcgcatttggttgattgttcgtttgacatgatgagactggcttctgtgtcgttggtattaatagtgggaaacggtgaagacggttgatgggttatgggttatggccgttatggagaggttggttgtttgatgttatcggatcattcgttttgaagtcgtcatctcctttgaacgacgactacgacgatgatgatgataaacacaaacgcgccatcaatttctgggaattcgcgcgcgacgcgttttgatgaacaaagaagggaaggaaggggaggggacacggacattcggagtttttgaaatcagtagaaatagctcaatgtccgctctctggctccgtcgatcgaaaggacatggaatcgtttcaatgtccgtcgacaacttgttcgatcacctatcgctcgacctcctccagaatcccaagccaaagtcgaaatgtcgcaaaaccaaggtcatgaatagcgccaggcaaccacctgtcgacttgcgatcgactcatcgaaagaccaacagatcctgcatcagaatgtcatcagcgacgcccaagatcctacgcacagctctgcggacggtcatcaagccccgtctcgccttgcgtcaagcatccacatcgacaaattcgaacaacgccccgagctcgacatcctcgggcgacctgttactcgacatcctacccgctcgtatccaacctctcgtatccaaatcatcagccaaacgtctactcctccctcaatcatccaaaatccctacgacatcgtctcagtcgggcaacacccttcccccatccaatgcacctcagcatgtgcatatcaaccatccgaccaggttgttccagcctccctcggggcaactacgagcagagttgttgggcggttacaccgaggtacagaacaaggaggccgttttgagtactctgacggggatgagcacggacgagatcagggggttgaacaggtacacggtcatcctcaagcgggtggtcaacatgaccaaaaagggtaaaatgtgggtccatccatcgcctggcacagccctgccttgatctctcccccccgtgtacaccgaaccgactgacacgctcggatccatccacctcttccctcccctcctcgactcccctcaatacccccttgcccatcgaacaactcgtactccgcaccatctcctcggcactggtcaccacgctcggcaactcggccctcccgaccatcatacagaacatcaaacacctgctgtacgagaaacagttcttgaaggtcttcgaggacgagaccgtcctccaagcgtatgcggccaggtgggtgccgagcagggcgttggcattcagggagatcatgggggaatccgagtacgtcgtcaggtcgctccaagggaggaaagctggagccaagagtggcggcggggggacgtcggacgtcaagggcaaaggcaaggaagagtcgacgatggatgtcaagccgaggaataaggtggtctgtctcggaggaggagcagggtctgagttcttagccctcgtagccctcgtctcgcccgagaacgaatggaccgagttccccaaggatgctccggccggcacagcatcgaacggagagtcgagcgacgacgacgaggacagggagacgagacaaaggcagcagagacgggtcttgccagcttgtgacgttcatctagtggatatcggtccttacgctcctgtggtcgacaaattcaccaccagcctgaggtccacattgccctcgaccgactttacggaaacgttccatcagaccgatatcctctcgcccgaatccaccgtcctcgaggatctactagaaccgtcgataggagacgtggacccgtcgccacccttgatcaccctcttttacaccctctctgaactcttcctccaatcacgcccagcgaccatcctcttcctggacagactctcccgtgcggccccgcgtgggaccctcttcctcatcgtcgactcggccaacgaagaagccagcgcactaggtgtagggaaagccggccggagttactccctcgccgacgttctcgatggactcctcaccgccgtcaaaccgcgcgaagacaaggacggggaagaaggacccccgagacccaggtggaagcgactagaagggatcgacagtcgttggttcaggttgaaagcagggttgcaggaaaagtacccggtcaagttggagaactcgaggtactggtcgaggttgtacagaaaggagtagccggagcgacgacgaggtggcgtcctgcgtaggtgttcatctccattggcgcccatatatatcagttatactcgtccagctctccaaatcattgcgaagtcaagtatcgcaggtatgcgatcgcatgatagtcgaggccgtattccttgtcgcgaccgaggatgagcaaagactcgagttgccgctgcgctagacgctgtgatggctaagagggaatcgatggtaactgggaaggctgaattgatcatgacgggcgagcccggctactagacgctgtgatgctccgaaagctgcgtaatcctggcacgtcgactcgatcacaatatcgcaacccgcgcaaatggctgcttcacgtcgcaggggggttgacggagtctctttgctggggttgcgaacgtcagagatggtgactgggactcctctcacttgtcgtattggtgtgatgcctagtcgaaatcaatccaagtcttgcgctaggcccacctcgccttatggtgaaggacgaacaagtatcgtctcggacccctcaattccaagctcgaaaccaccacggcttagccgtcttctctaatatcaaaagccgttctgcctgaatctgaaaagctggaacgaaggatgtaacgggatcgcgccggggcagaatcactcggttgagacaagccgaaggcctcttgcgggcaaacacactttaagcgcaaccactcacccccacgtctgtttcacaggacgtcgcgaacaacttggggcgtatctttcacatgagtccggagtccagtgaagctgtgcgcgttccattctacttcatggacgtcctactaccaagaccactatctgcaggccgacaacatcgagttcgtaatatttcgggctagatgcacggacgatcgcgacggcttatgaatatgcgtgtcatcaataacaatcccaatcgtgacatatgctactgctcgccccgaacctgaaattcttctgctgatacaactgtgcaatctgtgatggtgatgctgccgttcacgttacatcctctgcatcctcgtactcaaggtgctgactttacgtcgcctgtactctcgcctggcctcagtctcatccgtcccaccgacattgccccatcctgcgagcgggacgacgatacaactgcaattatcctcggcgcccaaatcctcggcaaagttgacaatggtcgtcgcggctcgatgaggatcgtgagcgtttcgcgccaggtcgatgatctcttggttggaaatcagagccgagacgccgtccgtaacgaacaccatgtaggcatagtcggatcctataaaggcgggagccgacaatcagtacgagaccgtcgcgtacctctatagtctgtagttttccttaccgttaattattcgatgtcgaatctcgggctctgccgtcacgcccaggggtttgaactcgccatcaccaaaactgtacatcgtgttaggggtcagatcttgtctcatcaatacgagtctacgataccgtgctctcaccttcgggtgttttccaccgcgcccatccaactgaccgatgagttttcatccatcgtcagcccacatcacgttcgttcctaaacctacgtgagactcaccgactctccccaaaactatccgtgatcaaccctccaccgatcctcctcaacctagaagcttctattcgtgcatctgcatgatgtcgctcggtcaggggttcgaccttgcccgtgtgtcgattacagagcaggatcttggtatccccgagatgcgccgtggtcaagctgatcttgttggcaacgaagaacggctgaacggggtcgtccagcgagtgcaggagggccaaggatgccgtcgagccgcagcgtcgagtgtcttcgcgggacaagaggagttgatcggcctgttatcgcatagggtacatccgatcagtgacaggagaatgcgaaatggggaacaggacgacacggaccatgagaaaggcgagcgtgaggcgctcctcgagcgtcatccaatctcgatgatcaggatgaccaacccattccctcaacacgcctcccctgaaccgcttgaaataaccacctacgagcgggccggaatgcgaggtcagcaaaggcacattcgcttgcgccaagcgagataacatctggcatcaagagggaggccaccggaaactcaggtcccaacgctcacctaaccgtttcgtaaacgcgatcgtctcgtcaatcgtcaccggatggacctcttcgatcatgccatgtaatcgtttatgcaaatgctccgagacgtgttgtccgccgtgtctacgagcggtacacaggtggcaggtatacgttgtacggatccgcgagatgccagaatcacaatgtcggcgccgagcagcaagcggaagaggtataaagaggagtgggggataatagtaatgagtccctgattcctgaccagatacactaacgatcgcggccaagatccgaactcacccgtcaaagatggcaaagtaccctacctgccctgccaattctttagccgtcgatatctgagctgccgctcctcccgtcttggcgactgaggacgatcctgccgttaccggcgttgatcctgaacccgagaccgccgtcgatcctgctgcggacgtcgagtccaatgctgatgatgccgatgccgatgtcgacccttgaacctgccccgaggtaccctcgaccaccggtgacctcgccgcgcttcctttccccttttgatccgcctcccctgtcgaacccgaccccgatgcgagtccgggggggatccaatccacctcgtgtcgcttcaaagaccgtctcagctcatccgggttcaagtgaagcgtatgtaccgacgtccggtcttcttgatacctgacagtcaggcaggggccgaagaggtggtaagatggaggggggccacccatcccaccgcctccgaaaccacctccgaatccgccgccaagtggtccacccagtccgccccgtcctccaggttggcgcaagtctgggccattctcaccgggtggcaagagttcgtcaaagtcgggctctccgggcgtccttccacctcggatgccgccgtatcctccgcctaacccgccctgacctctattctctccatcgggaccaccagggaatccaggtccgaccggatcccacctcgctcccggaggattcatcattccgcctggtccttgctcccttccatcatcccgtcgacccctgaacatcgggtggtcgaaatcgaccaacatcccacccccatccccgcctggtcccggaccaccaaagggacccagtctgccccccatgcccggaggttggaaagccgcggtcggatctagatctcgatggccgaccgaggggttgtaagggttgtagtcgcggtcattgttcctcgagccggaactcgggtccggccgatggttgttgtaagggttcgatcgggggttggatgaggtcggcggtctgtcgtcactgccgctcctgccggtatatgtgaataggaattaatttacgcttgccacgatggataccactcgactgcatttcgtactcacggttcggtatatccggcgatcctcaatccagggatcaacttggcgatgacctctcgcttgtacctttccacaaattctctgagtctgtcgtatcacctgccttgtcagccaggattgaaaggacgtatacccaacccgtacgttcgactcacttggactcggagacaaatcctgcttgaacgccgtggttggcccgactcgccggctcgtccgaccgcggccagggcaagaaagcagggtccacgagttcactcaagatggtcgatgtctgacgaggttcgccgtcctgagcataaccgcccccggatgatcgcgatcaggtcggtcagccacgccgtaggatgatacaccattctctgccctgggtttcttcgactcacctcggccatcccgctgacattgatcctggcgcccatccttcctacccggacgatgaaactcaacccgctctgctcgtgcttgtaagtgaacgtgtacgaatcctcccctcggtcgttccatccggccggaagtctggcttcggtggctagcctgacgaacctggtatccaacgacgaggaagaagcgctgggacgacccgcttgttcgtcgtcgtctccgtcggcgttgacggcggtctcggtctcgctgaacgtgtcctcgttatcatccgaacgtccctgttgctgctgttcgtcttcctcttggtgttccgcagactgattcgtcgagcttgatggtgctggacgtacgagcctgaattccagcgaggtgtggatggcgtggacgagcacggcggcgagatcggtcggggccgtcagggtggacccttcttgacccctctcgggcaagaggtacgggactagctgttgcaaagtggaagtggatgttggatctgtcattgctgtcgtctaccaaggtgaatcgactccttttactgtatggtaatgaaggtgcaggacagaggtgatctcgatgatgtatatatgaggtgaggtcgggtcgacttgccccccctcctcctgcctcgcggaatcaaatcgatcccattctatcgctcaactccgaatgacgacatcatcacatctcgttcatcacccgtgttggatcgtgaaaagatacgcatagacatatgcgagagtcacgagtcacctctcgagggtatatacaacgtatgtgatttcatgcagagagcatatgagcactactgtagcatctagtcgtgatcgactccgcctgaggacaaactctacctgtaccatccatctacccttcgaccttgcgcaccttgctaggggtcggcgcagagacctctccgtcgtcttccttctttgcctcgtcagcgtccttttcctgcttgtcatcgctggtcgtttgctcccctttcacctggcccgcctcgaccttgatcccgtgtccctcgtctggtccacccgcgacacccaccctgccctcgccagcatggacaatcgcccctgctccctcacccggtatcccccccaacctcgctctttcctctttggcggggtccatcacctcgacgcctgcactggcgaacctatccgtcaggctctgcgtggagacggtccggggtagctgtttcatcgggcgattctgatccggtcggcctcgacgattcctggcttttacggtcatgccctcgatgtagagcgtgccgggtacccacgacggcccggtcaggatttccgagggttgagcgtatccagaatcgtccccctcggatccggtctctgatccggcttccacttcgctctcgctctcgtccgtgatcgactttttcgtgtccctgtacccgccatcgtcctccccagggtgaccaccgccgccgctcagggcgctcaagtcggtcgtgctcgagatggctctcggtctttcgctcaatccgtgctggacgaccatcccaaccccatccccaccttccccgcgtaatcgatgaggatcctcggccgagcccgggttcgtgctcgtgctcgggtccgccatggtacctagagcagacgaagacgatgccgacgacgaagccggtccgacgagggggcccgcgtcgagctcgtccacccttcccaagaaagggtcgggtgtgggatcgacgggaggacctcctaaccctgctgacgagtccgtcatgtccatccctgtccccgaactgggccctacttcgacgttcatcggcggtcgatccgtcctcatcgacgccgccatgtcgaacccggcctctcccgatccatgcgcaccggcctcggacgggtcgatcaggacgaacaacggtctctccagtaacaacgccggcgggactccagggactccggaaccgggtgcgatggtatccgccccgccggctgacaatgtcgaggcggacgggtcgaacgtggacgtgacgagcaggacgcgttcgagcgctcggacgtactttcccggaagacggtgttggcgatcggggaaagcggcgagctcgcacaacctctgtacggtgaacggaggttctctgtgggagcggggcaggggaccaccacccgaggtcaacggaaagatcaacgacctggatccactcgatccgctgccgactttcctgccctactcacgcttcaaactcgtccaacagcctccagacgctctccaacaacccttcagcctccctcggtcggagtcttcctggcaagatcttgcccccgatcgcggcctcttcatcgaacaacgggtccgacccggccatccccgattgaccctgctgctggctggacgacaggggttgattctgaatcgtctgatgcgtgtacccttgtaccccctgtccctgcttgctccccaaaaggtaatccaaccctccggttccactcgacatgtaccctcctgccgagcccggtcgatcttgggcgagtttctgacgatcccgattccgtaccagaggggggaaaggagggagtacgagacccccgggtgtgctcggtgtgtaggacgccgtcgactcgtcgagatcccccttgagggaagatcgagcatcctgtcgtgctcggtcaagaagattagggagctcggactccatggcgaagctatcggcggacccgtctccacggttgagcgggtgttgttgggacgtcgtgtttgatttcgagggggagctcgagctggacgccaagggtgcgttggaggggaggaggaggaggtcgccgatgttctgtttgatacgtagtttgagcatgtgatggagtgccgtccaatccgagctgtcaagcgaggaaggagtaggaggtcagtctcagcgcgacggggggggggggggggggggcagtccccatcctctccccacctcccctcacccgatcagaatcgatacgttccagtgatggatcatcggcattgccgtcatccgataacggacttgggcctttcgaagatcttttccagatccgcagctcgtcccctgttgacgacgatgctgtgaagatgcgggaaagcaaggtcgaaggaggattgagatgggtcaaaaaggagcctgcagaatctccacggtcgcccttcaaccccaggcctattgcagtccagatgaccgtatccaagtcgatcgaagtgggaaacaaaccttccgtggtcaaaggctcagcggctgtcccaccttcttcacaatcgacgttacgagcgtttttcgcaccgaaaccccgacctgaaccactcctctccaccggcctttccctccgggcagaagctcgagcgtcgtcatcctcgacttacacctctgtccgaccaccaatgagtagcagtcgcacgcctttgacatcctcgacccgcccagccgaccctatcaagaaattccgacaactccactttaaacgctcctccacctcgtcctccgcgtccgactttaccacgtgcaagagatgcaacatgtcttacatccgcggagagccggattcggaggacgaggtgctccaccgtaagaactgcgagagggtcgtcagcgggacgatctgggaagaacgtgccccagggagaagatcgacggggaagcaggtcggaggggagatcttgttcgagaggcgggagcgggagcagagggaggtgggaggcgtgaagcggtatcgaggtgtaggtaggattttgcagatcgatggatcggctgcgactagtacctcgagggtgagtcgaagcgtcttcttctaatacacaattgtcaacagtgtgtgagtttgtatggctgaccggcgtgtattgcttgtcgtatagatctcggacatcctctcctcggtcgacactgtcctctcggctccttcactccctacggagatgctgaaccaatgccaaatcttcctctttctcacttcatccccgaccccgccatcgtccgggaaacgtctgccaccaggatcgatctcgacgcggaaaggcaaggacaaggagagggtcgtcggttgtgtcgtcacgcagcctatcaagtgggggatgcggatcgtggaaaacgttcctgccgaggcgcagcaagaagagcgggatgacgtgattggtggaaagaggaaaagggatgacttggtggtcgtagggaatcaagccgacgagggatccgacgatggaggggtcttgtgctagtaagcccgtgaaccatcctttaccccagatctctcgagaaaaagttctgatcaacggttcgatccgaatcgtagcccggagagacatcccgtgaaattgggcgttcatcgaatattcaccgtaccggctttcagggggtgcgggatcatcaggtctctcctggatcaggcctgtcgaagcgcgatctacggataccaggtgagtcgttcaggaaacctcctagattggcattcagagttcgtgctgaacgatggtgcgatcatcagtgtgaccctgccaagggtgacgtagccttttcccagccgactcaatcggggaagagggtgatggatacgtggggtcaggggcgcgtcttggttttcaacgaggacgagcaagacgacgatagcgctgacgagggcgaggtcgagtaaatccagaccgagaacacagtgtcggcagcatatggtatacgacttttaacgaggaggatatttataattacaccaatttcaggctttgaaacggcaaacgaacgatatgttacgccggggggttctccgcccagcgcttgtcgttcatttgtgcttgataggaaaactgcgatccggacggcttcgagcgtcagcgagatgtgcccccagatgtgcatgtgaagatcaatcatggacgtactgcttggaagccaaacgttagggggacgctgaccaggaggatgaatcctgcaaacatcgagcgttcggctgagcggcagcaacgagacatcttgaagccctgatgaactcacccgcccacaggcagaacaattggacgtccgtcccgtcgtttcctccgccattaccctgatcatagccgtaattaattccgtaccctccgcttggactaggatcggtaccatagtagccgtatccaccgtaacacccgtcaccctcgcatctccccgccaaagatcgggaggctacgttgttgccttcgtcatagccgccatcgccccgggagatcccgtaaaacgattgtgacatgtaggcggtaccaatgaaaagcttgaggagtgctaagagcgagaaagtaggatcagccacgctaaacaagaacaatacgacctcgctccacacgtacacaagccctgacgcaacaagagcgcatcccatgttcagcttccatgattcctcgacaacaccgcgagggaccttgacttacgacgatgaaaaacggttcgcgtatcgctttccgctctgaatactctttttcgtatcgcaggggtgccgacaagtgggtacccttgaacgtctgcatccccctataggctccattatcaggtttggcgtagaccagagccaggtctcccagtccgacaaacgcggcgaaaacgactgcaaagtctaattgagcgatccgaagcgtcctgataggcgtaaaaggtactgactgatggaagcttggaaggcggaagaaaagacgagcgagccgacgtgtttcggtacgttggtcagcgcgacgtaacccgattgagggccgctcggatcgcggtcgtaacctcgtgatgctgagaccggttcgacatgggaagaccaaatcagccgatcagacgtacctatctggagtcgaagtggctcttacggaactcgtccccatagaggtcgtggtacctctgaatgctattgttcatctgatgcatattttcgcaggtcgatcaacagccccgcggaaatctcactttgattgacttacgatgatcgcttctgccacgatcacgagaactatggacgcgatggctccgattagcaagccttgatcgccgtgagtccagcaaactagacgactcactcatgatcaggacggaaatgaaacaccatactcgacagatcaggatccataacctgttagatgcgtggccgtaatcatcttcagttgccgagcgagattgggcgtgtagcacatcgaaagttgggaactgaccgatttgaggccttcaagggacgacaggcaaatgatcattgtttatactggaattggcggaagcaagagataaagagagaagggctcacgttctggtcgccggaaagacggttcgtctcggccatggcgttggattatgaggacaactcggagagtgcggtcggagagaagggttcggttgagtgaagagatcaagagacgggagaacaaggtgactggggctcaggctggaaaagatcgtcagtaatcatacgatgctgcaatttgcggcctgtaactcacgttaatgggaaggggatgtgagaagaggaacgctattcaggggggcggtgcagggtactcggagcgggtgaagaagaaggagagactgttgcgcgattctgtcgtctattctttagactcggctggcttattatagattgccagttgacacaagtattccgagctatgtcgtcagcttggagaggtcgtcaaaggaattggtcaggagcgattcggactgctgaaacgcacaacgaactggctgaaacttggtgtgcgccttatacacaccccgctattttattttttttttttaatgatacggcgacccccgagatctacaccgtctaattcgtcggcaccgtcagatgtgtataagaaaaaggatcagaatccggggggggggatcaagaggcaaacgacgatcctgaacgtacggtatcggtgtgccccttgagcgtgtacaagatctcttcctttctcaaatcccagacctatatcgagccgcaagccgcaagacgatcagtccgctcggtctttctcttcccagctcgaccctgcacgaaacgcgaccggcctcgacgctcaccttgatctcgttatcgatcccgcctacgaaacacaccgccccatccttgccccactctacggcggtgatgcacccccctgtcccatcatccaactcgacgaccggttccttccttccatcttctacgagcgcgatcgggtcccataccctagcgaccccgtcatccccaccggtgagtacgaggtctttcccgctggccgtggcgttggacacggagagtccgttgacgggtccatagtgcgcggggatccgaccgagtttctcacccgaggtgagcgaggtgaggaggaggttcccatcggccgatacggtgtacaagagggaagggtcggacgggctaaaggagaggtcggtgatggcctgtttgtggaggttgggaaggtagccgttgttctcgtgaggagggtaggtttgccagagggctggagacgggcgagtgatcatgaggagagagagtcaatgtcaatgggtgggggatgctggacgttggtgatgatcgacggcgacgtcgacgacgaggtgacttacagacacatcgatctgccgaggctgcagcgatcctctcccccgtcgtgtcgaacttgcaagcgataatttcaccctacgccaagaaaggggtttggtaacacaaagacgatacgatggacaagatgtgcgagaaagagtatcattgttgtgtcagttgatggtcatgacctgcttccaaaccccccgcctacgtgtgacctgccggtcaccacgcatcgcacaccaggactcacccgatgggcacctcctaaactgacgatcggtgctgccaacccgctggtcctcttgaccgatctgacgagtgcacctttccctcctgcagctccggatgaagcgacggtcatggtcgtcccatcgagtcgatcctggtcgtcggcatcaccgtcatcgaccctggcgcgtttggtgagcgcaccattggatgatgatgtcgtggatggtggtggtgattttcgaacagacattgggggcaaggcaggcaggcaggcaggcaggcgactgtatgctaatacaatgtagactctgaccgccgaggtgttgtagtacaagttgatagacactactgtttactctactcacctcaccgctgctatcgttccaatttccccttttcgggatttttcttggacgcgaccaaggggaaaagttgaagaaacaggggaaaaaggacatgcaaaccaactatctatctaccccatctacctacctacctaccaccaccactaggacactagccagctagccagccttcagtacgaccaggtacgacgagacggacgattcccaggatgtcatcgacacaccaatccacccgcggcccacaaaaacgagcctactcgaaaccgagaccggccgagctcgtggacgaaccggtgaaaaggtcgttgctcgatgaaaaggcaaagagagccaagttgatggacaagcaaaagaggagagaggagagaagggccgtagaggcgggtactgtggaagatggcggcgaagatagtggtgaggaggacgagcaggacgaggaggaggacgctacatccgggagcggcgaggacgaggacgaccaggaggaagatgacgatcaagacgacgagcaggacgagcagcaagacctggacgacctggacgagcagcaagacctggccgacctggccgacccgatcgaactcgaagacaccacattcgcctcgctcggcctcatccccgaactcgtcaaagctaccacctcgctctcgttcaccaaacccacgcccatccaagcccgttcccttccccccgccttggccggtaaagacattatcggactcgcccagaccggttcggggaaaaccgcagcgttcctcttacccatcctccaatccctcttcacctcggacacgccctcgccgttctacgccttggtgctcgctccgacccgagaactggcttatcagatcgatcagacgctcaagggtctgggagccgggatcggcgtgaggagtaccgtcttggtaggagggatggacatgatgcagcagagcgtgtcgttgggaaagagaccgcacgtcatcgtcgccactccggggaggttgatggatcatctagagaatacaaaggggttctcgttgcgaaacctcaagtacctcgtgagtttgcgcatttcatcgtcctccatattccgtgtccagtgccgctcgttcctctctccgactctgaactgacccaacccgacccgacccgacccgattcgactcgacgcaggtcatggatgaagcggaccgtctgctcgacctcgatttcggacccatcctggacaagatcctcaaggtcatccccaaggacgaacgacggacgtacttgttctcggcgaccatgacgaccaaggtggccaagcttcagagggcgagtctgaaagaccccgtcagggtcgaagtgtcgagcaagtgagtctctcgctagtgtgaccgacgctcaacattgccgcctttgtaccgcgcgactcacactcggtgatgatccgattgcttctccccaggtactcgaccgtagagaccttgctgcagtactacctgctcctccctctcaagcagaaagacgcccatctcgtctacctgaccaacgagctctcctcgtcgagcaccatcatctttacccggaccgtcgccgacgctcagaggttgagcatcatcctccgattactcggcttccccgcgatccccttgcacggacaattgagtcagagttcaaggttgggcgcgttgaacaagttcaagagcggcggtagaaagatcttggtagcgaccgacgtggccgctcggtgagtgcaacctgcgggaccccctccgccgccactcctcgatcccggtgccggtgccgacgctgacacgatgccgccctttttccccgtcgtagaggtctcgatatccctctcgtcgacctggtcatcaactacgacatccccacgcactcgaaagagtacatccatcgggtcggtcgaacggcccgtgccggtcgagcggggaaagccatcacgctcgtctcgcaatacgacgtcgagctgctccagcggatcgagggggtcttgggcaaaaagatggacgggtacgccgtggacaaggaatccgtggccgtgctcggagagagggtctcccaggccgccagggaagccgcgatggagatgagggaacagggcaagagtgggcatggtgggaaacgagggcgagagtttggggcgggaggagcggacgatgctgatcgggacgacgacgtgcgggaggccgggatggcttacaagaaacagagacggggaggtggtgcaggaggtggtagtggcggtggcgggagaggaggtagtgctggtggtggtcgaggaggtggcgagcggggtctccccctcccccttgccctccccttgtctttcccctttgggcgctgggtggattgtcacaatcttatctcagctcgcgcgcgccggacattcccgatcgggcaagtcgagagacgtcgtttgagctcaagcaggtcaccgggtcgaccggtcggtgtgtaatcaagacgcaacacatcaacgttcattcaactatgctctaccaataatctctaccctcagcaaacacaagacttcaaccaggccaacgaatccgaccaacatactatcaatccccgggcaagccagtgacggggaacttcttaaccagcgcttccccctttctccccttgttcacatcgacccatcctcctccattcatcgacacttggaacgacacttcgacccctactttgatcgttcttcagtcgcgacctcgacgtccgcccaactttctcaaaaagaggagcaatcacgggtagcctatccaggacttactcgtcatcgctcccctttcaacccggaaatcgtctctcctctcagccaacagctcgcgatcgtgcgttcttgcgggaacaacgttcgtcatcacgttctcgagtcgagcctagcacattacacgctcgcaaaccgtccgaccgtgtcaaacagcatatcgtccggtcttccgcatacatatcgcaaaccacctcgaaggctactcctacccgctcacccgcctagcttaggaaccgctcacgctcaccctacccgactacgcgcgagatgaagtacctcgacattccctctctcgccctcttgtcttcggccttgtcctactcgagccccgaatgcaaggttcacacgcgtttcgaagcgtacagctgtaaagaggtcaagaaggagaggaaattgaggagagagctcgaagaggtttggaagggagaagtcggcgaggtcgacgagtgagtctcgccattcgggtcgggtccgatccggtcgatcagcgcgtggttctggtccgccgaacgcgtcacgttgctcatccccgatttgcgtcctacctcgtcgtcaatgtcgtcgtcgcagcttatcgatatccccggaagacaagctccccctcttttcctccccctttggagacctacacgcttcgtcctcgcgcaagatacatttcctgctcgtctccacgctcaatcaggcttacccggattacgatttcactcacctcggcgcggacgagtttgagagggaacccgcgggggtgattgggatcttggctgcgctcagtggcgtcgtccggggcggggtcgataggacgggaagcagcccgtgagtgtgcgcacggcgatcgatggatggatgtccgccaggatccggcgaggtacttataatattgtcgtgctcaccgtgcagtcgatcgtacgggtcctaccccacggccatcctcaccccacctcaattctcttcctcgttaccgccttcctccctacccgaggggactactcagcagatgatggacctgtccaacattgcccacccgaccttgctcaaaatcctgcgcgaggtcatcgatctggacgactgtatcgcctattcctacaaccctagcgcggattgcgacccgcatgccgaagacgacgatccggatgacgaagacgtcgaactgggcgatgggggggacgacgcgtcctcggcgaatcgaccgggcgagagcggtcgtcgcgagggatccgattccttcgtcgatcgggatggagatcgggaccacgccgacgtgtttgcttactccgacgacgaggaagggatgatcatggatatggaattggatgaccctacagccgaaaaggagcgaaggctgaaacgggacgccatgaaagagagcaggaacaggatcagaagggagagcatgagagacgtcggtcaggccgagagggggaacggcggtctgttatggagcgtcaattacttcttctattccaagtgagtctgggcacgaaacgatacgttgcgcgcaaaccgcagcaagatccacgacgccgccccgtggacgaaggctcacaccgtccttgtctcccgcggcagacgtcaacgacggatccttttcatctcggtctgggcgcgcaagagacaatccgcctttctcgctccgatcacgatgccgttgcacaaccctttcaagacgtacggactgcatcatcactcgtcttctcctcgaggcggattcgcatcgagttccatgcctagtctgacggggttggccgagagtatacacaaggaacttcggtccgccccgcctcgcgctgccgagccgggcgcaatgatctcgacctcgacgacgacgacaacgacgactaccaagctgcctatgctcgatcgaacgagcgcgagccctcagaagggaggatcgagacctcgacgacgaaggaggagcgagagcgtcgccagtaatcgcagcggggtcagcattcgagctcgagggaaacgcatcaaggcttgacgagtcgggtcggattccttaaagaccggctcatggacacttttctcgacagatttctcctgaaccgacgtgtatgtattaccacgtagctgacctcaggtcagcaagcatcccctcgagcttcaaacgagcgctttccttgtacatccgggctcgggttgtacatgggtggctgagaaggaggacttttcaacccgttgtacagtgatagttgacttgcggtcgatcacgggtccgcccgctgtgtgtaactgtactactcccttgtagcgatttagcatagccactaattccgtatcattatcgtttaatcaagaccatccatccccgggatctcgccgtcgtgtagcgggacttgatgcatgcattccttgactatcgatcgtacgtggcacacctgctcgtgaccgatcggggaacgctgcgagagattgaccgacgaaacagaatcaatcatcggatgagatgatccgagggcaaggaaggtatttccggacctattgtcccgcgaggcatgagcgggccccctcccgatggcgttatttctcgataaagcgattcctgttaaattacaatctagattgcgaatgtggcgtgaccctctaatcgtgagtcgctcgaacggtcatcctgctcaactcagacgtagtcgtttcatgctcgggaggatgatcgagatgtagcccgctcacaacggagtgatccgtccacgactgggcaaggcgcaaggcagctccatcgtcggccaattccggattataacagcttttgcccagggctcgagggctcaacaggtactcgcgctcttcgcgaatccgagacgtctggggtcgttagcgactgtctttgccggccggcgtttgatggatgtcatcctcgccctgccgcttcgagcccgccccgccccgctgctggcttctccgccacgtcgattcgggggtttccttccaagcgaaaccctctcccccgccgtcgcggggccgaaaaggttccgctcttggggatcgtcatctgaccccgtcagatccaaagtctcgatacggctaaatatcccgatcgagcgtcattctactgacatttggtacagcatggcgaaattcaatctatcgagaccgccgggggggggggggacgacgataccgatacgggtattcagaggctgatccacgacgacgacgacgatgacgacgacggtagaccggtctgactccggatcctacggtcctccatcgagcatcgaccaccctcctccgacttcgaccttccaccctgtccagcccagtgcattacccttccactccgacctcgatcgattccaagatcctcgcccggccggaatgctacgaccagcaaggcgcgaggacactggagaacctgcctagaggaccatcgggcgacggaggagtcctcgagggcgagaagggcctggaaagcggagatctccaaaagctggacgggctctgggggacgttgaaacgcgtaggagaggcagcgagggaggaaggtatcaaggtcgccgtcgacgccgaacattcgtggtaccaggtgagtcgtcccgagttcagggtggatggagcttcacagctaacctcgctcggtccgtcgtcgtcgtcgtcgtcagccggccatcgatgggtacaccatgttgctctcacaagagtacaaccggatgcccaagcagaccgccgttcacaaaaaggagattgagaggtccctacccgtcttctagtgagtctcacacagcggccagatgatcgacgttcgctggaaccatggccgactcacaatcgactcctctcctcgcctcgcccttcacagcggaacgtaccaagcctacctccgtcgcctgcctgaacacctcgatcacgcaatcaagcacgccgaggagaacaattacgtcctcggggtcaaactcgtccgcggggcttaccacttgcaagagacgaaaaagtggaaagacgagggcaggggcaagtttggcaaggatcccatctgggacgagtgagttcgagccgtacgggatgggttgtaggatctggctgaatatgacatccctcggggcctttgcagcaaagctgccacggacaaggcgtacgacgacgcgctcgtcctcctcttgcgacgcatctcgaccgacctgaaaaagaaccccgacggagtgcccctcgtaggcgcctactttggaactcacaacaaggagagctgcgagctggtcaaggatcgcttggtcgccgaagggttgggcgaagaggtcaaggagactggtagggtcaggttgatggacggcgtcgcgggcagggtctgcaccgggcagctatacggtgcgtcacagccccgcgtgtagagacgtggcgggacgcccgggctaatgtccctggcggtcttggtatcgcaggcatgtcggacgagctgaccgagagcgtcgcggcaacgtacgagaaatcgggcacgcccatggccagcaaatacttgccttacggagccctgcgcgaggtgagctcgaagtcattcgttgtgctttcagtccgtatcgtatgctgacgcgagagcttgctccgaataccccaggtcttgccttacctcggacgaagagcgatcgagaacaagtcgttgttgagcggcgagggtggggccagcgccgaacgacgacgggtatgggccgagatccgtcgacgggtcgggatctaatccgagttcgagttcgaggtcagggggaattgaatatctgtacttttctgcaactgtatacttgatgacgaatgacgatgacgaatagagcggcgtcgagtcttgatcaaggtcgtcgggtcgtccagtacgacgtgcctggactagacatttgggttcgagcggagacgagtcgacaagcacgcagcctagagtcgtcgtggccgacaagtctggaacaggcggtggtatcgagcgctctcgactgtcgccactcgcaatcggtcaattctgatcccgactttatgcagaactctgagaaggtcgtgttctttcatatgtccatggatgactataggcaggcgcaggtaacgaagcctaccaccgcgtcaaagggtgtggcagaggcctacgactcgtgcacagtaggggacggtacaccatattcatttagcaaaacagagtcttctcatatattctaatatcgcttcacattcgcactaccacctgaacagatgggtaattcggagccggactacctggtctggattcaatgagaatttccggaatagcaccgttgattccacgaccttgcaagggcaacctgacgctgtcacgagaggagtcacgccgactgatcatagcattcctagggtcgacgatcacgtcgaccgactctgggattcccgtactttggggaaggatggtatcacagcccgccccgatagcaaagaaagatagatgaaaatggcccctcgattcctacgcaatagtgaatcagaggcttcgtccgcggtccctcctggcgatgctcagggacacgtccttgtcaacgtctaatccacctcggatgcgctcttctcaacacctcgatatcacgaggaaattggatgacgatgatctcaatgctaactcctaggatcatgcaagcgagacacgtagattctgatcaccatgcgcttgatggatgatcatcccctggaacgagacccaggcatcgggcggaatggctgttggtgagggaccgacaattataagactaaggcggggataggcgagaaccgaactcctcgcacaagtacatgcactcgggagaaagcacgataatcgaccgagaccagctgggtccgtggtcgatcttcgaccgtgcgatgggcgacgggcaaggggacgaaactgaacgacaatcgatagcgatcccgagcatgttcagaacgacggagttatggctggtttcgggactagtaggcgacaaagccaacaatgtgtaaagtgaggtgttcgaagctgggcaaggtccgaaacgaccatggacccctgtccgggacgcgtttcatctttatttgagaggggggcgcccggccgacggagtctatccccgcctgacccttggtcgaggcttttgcgcgtgggaatcccgcggaatcgaccgtcacgggaatgggaatgaaatgaaatgaaaaggaaagcgcgcgaggcgggttcaagcgcgagcttcgcagccggaatacactactgctactgctggggccggtacccacgctcggttcagatgcggtgtgattacggcaatgatgacgacatggcaacgcccgcatctccgcgtctagcaatttcgagatgattaggctcgaccttcgcaccgtgcaccgtgccctggtaccaagtccggatcacccatgttcgttgcaatcctgagcaagcttctgagcttctgacctcttacgtgatggcgtgtatctgtgtgagacccaccggtagctgcagcacccgcctaaccttggtggtcgagacttgaccaccccaacctgaacgacaaggattgatgatgacggtccacgtcagcctgtggcctgtgacttgtttgagctcggttggatccggtgtataacgtcaccgaacgcgcgggcatgagagggagacaagcaaaggcgaggtaaggcaagatgaggcggtgagaaggcagagggaggggcaggggcaggggccccccgccctgccccttccccatcggacctgaccgtgcccctgccgccgccgcgactaactcgcccgtgatcaatcgctgcgcgccccacaacgtattatcccatcttgtcaggctcacacctcgcatcgcctaagagaccggcctttgtcaacaagaatcaacaagagcaacaccgcacgcaaaaaaaaaaacgggaagaagaagaagatagaccgtacattggaaatcctccgaacccctgctttcctatgcccttgcctctatgatcgatcggggaagagcgagagacgagcccatgactcgtttaatatcatacaaccaaatacgccctgcgcctggaaatgacaggcgcagagagaaaacaagcagaaccggggggagaaacaccagaggaagacgagagccgagtcgaggacgaaaagtcctcgctctcagacacgtctgtgcgtgacggacgcactaccatccggtatgtgcacactttctattgctaatgtttttgtgattttataccttgatcgctctagagctaatatcctcctggtgggcattcctgtaacagaacccccctatggtcttccatccaactcgtgcgcctcttcgtgcccgcctaggcatcgaatcgcgagttgtgcaggccgacctcgtcattggcgggcatgtaatcgttgatcggacccaacttgggcgaatggttggccagacccatgagcgcatcggatccgtctgattgaaatcggggcatcgtcaacctctgctcgtcgttcggtgcgactggcggagaagcggtgggactcactcatcggtccgctacaaccgaggttctcctgctcggcctccccctgccatgtcgtcccctttttcgcctttgccttgtcgttcctcagcttttccacattgttcagataagcgtcgttgatcccgcccgtgacgtactcgcccgtaaagacggagcagtcgaattgggggatctcgcggttgaactgtcggcacgattcgaccagatcttccagcgtctggtagatgaccaggtcggccccgatgacccgagcgatctcgtcctcgtcacgttcgtgagcgacgagttcggaacgcgagggcatgtcgatcccgtagacgttgcaatgacggataggaggggcgcacgaggcaaagacgacgctcttggcaccgacgtccttggccatctgaacaatctctttcgacgtcgttccacggacgatcgagtctgtaaagccgggggggtagggccgacaacctcggaatcagctcgggatcccgcaaaggagcgacagacgggcggaaacgcgctcaccatcgacgagcatgacgttcttgccggcaaactcgagtggcatggcgttcaactttctccgcacattcttcctcctcatggtctgtccgggcatgatgaacgtcctcccgatgtacctgttcttgatgaaaccttccctgtaggggatgcccatgttctgcgccaactggagcgcggcgacccgggacgtgtcgggcacggggatgacgacgtcgatttcgagacccttggcggtcaagaccttgcgggcttctttggcgagggcgtcccccatggccatcctgctcctgtagacgctgataccgtcgatcgtgctatccggtcgagcgaaatagacgtattcgaaaatgtcgggcgaaaacgtggccggcttgccgacggtccgtttgctgaacccgttgcgggtgatgatgatggcctcgcccggttggacgtcggtccagttggtgaacccgagtgcgtcggccgtgaccgattcagaggccaagagatagtccatccccgagggtttcgtggccgacggtcgggtagccacgcccaagggtcggatcccgttggggtccctgaacccgatcagaccgaacccggcgagcatacccaagcaggcgtaagcgcccttgcacgtctccatgaggtcgccaatggcaccaaagacgtcctcttcgttgattctagcgacgtcctgcacgtcagcccacctgcacgtccacagggccagggtcaccataccccgagctcaccgaaactttccagtctgttgcaaattgttggccaagatgttgaggaacatttccgaatccgaatcggtattgatatgcctgtgcgcgtcggcgtccaagaattgtcggagttcagaggtgttgatcaggttgccgttctgcagagagagagagagagagagaggccgtcgtcgttgcgcatcgagaggtgagcgtttccatcacgcacgcagggagacgatggggagaaggggtacttacgtgggcaaagacgatcccgtaaggactattgacgtagaacggctgtgcttctgaatgagccgacgatccagccgtagggtacctcactgtcctcgcgacgggtcgaacgatgatgaaagcgatcttcagcgtcaatacgaacacgtgacaaggaatctcgactagactagactcgactcaccatgccctactcccatccatcccttgagaccagcgacggccttggtatcgaaaacgtccctgaccatcccgttggattttacctggtagaaccgaccgcccgagccgcaggtgacgaccccggcggcgtcctgtccacggtgttgtaacagggagagagcttccacgctggaattcacgagagggaggcgaaatgagacgagacgagacgagatggaaggggaggttaggatggtcggatcagtcgggttggtcagcccgggttggatttcgggggcggtcgaggcaaaaaggtcgagccgggctcacatttcggtccctgcgagggtaccatcggtagcggtagggtcatggagcaagattccagcgattccacacatgtttcacagaggcggaatgtgggattattggtaggatggcggggtctggaagatgtttcgggtcgggcgagctggttcaagaggacgagctctttgcgagtcgattcgagggtggatttcaagggagcaggtcgtgcggaacgtccgaaaagtgtgatttttcccgggtttagattagagtattgacgagcttgtttagtttatagattgatgatggtcgacgtcgtcgagctggaggacgatgctatgaggttttccgacttttgactctttctcatggtcgatactcgtttggtggtggatgctcgcggacgagtgatccgaagagaaatctcgttcgggctgcgggtgcaaattcggtggagagtagggggggaggtgggcagggacgatgacgactagtccaaggtcaaagttgtgtgtgtaggtgtgtgtgtgtgtgttgttgattacctaataataaacatgccctcactcgacgctcgacgctcgacgctcgcccactctggcgccacgtagcctctctgtcttctccccctttgtgtgctgcgtcggttcggcgacatctcgctcagcaattcaccgtcaatcagcctcaaaattaatagaccctcctatataccactccctccggcgatcgtctcatcaccttgctttgcgcacctactgactcggtttcgtcctccaccgacgtccagcgtatcaacgccgccgtcgctgccgcccaggacgccaaggccgccaaggtctagagcgttggagactgaagacgagggaaattcggaagggacgcaagaataatgagggggacgaccaagaacggtctgatctcgactacctgtttcttttatttctttgcttttccccgagttcctctccttttttgactcttacctgcgacgatggaattgatgacaaacccaatccaaaagacgtattacgttcggtccagttcggcttggatcgcttgagggttattctgtcggaatgaacgagtgtggtcgagcgtgaagaggtccaggttcgattttggatatcggagcgagtatcatcgaggacaagctgatctacacatgctacagagtttcgagttgctttgcaggtgctcaaatcgtccgcctggaccctgacaaagtggtcagtctacctccctggcttgcgatccgactcatcccgtattgactactcgcttcatcgcaggcaaataaccccaccgccgcgcgaccaaaggctctcgggttcaaaccccacacgcacacctgtgtacagtaccccccgcattcccttgttggaaaccttctcacgggggaaactgaaggaataaaagggtgcaaaaacaaccaaacgcgcgacgcatctctgaccgccccgagaggggcgtgtcgtcggggtgtgcgcgcgtgtcagtccttgggaccttcccacccttttacgggggtggcgaactcttcattcctcgttcagacgagtagggcgccgatcatggtcggggctcgttcttccccctcttccgggggagggacgtcgaggtggagggcgtttgagggggtccgggatatatcctttctgtttttctattctaaatatttgtcgtcgtactcgtcatgcaatatgatcttgattcacatttcatacgtcgagcggtccttcctgtggcctgtggtcggtgatcccgacgcagagctttattctcgtttcgcgcagccagaccgataccatcgtcgatctggtcaaacaggctagacgaacctgggtacatcagagggctagagggatgcgcttgaccaccgcgccggtgagagcgcaaggcgttagcagtgcgaacacgggttgatattgacgctgccgacgaacgtcgtcagctcgacagtatccgcgttcaagcggaacaagcagagaaaatccgatcggggctttgagacgatcggcagtccgcctcctgccagaggccgggagggggtccatcctccttgacgttatcttacggaggattcgccattccgactggtagaggccgcccggagggaggggggggcgtctggtcaatttcattgatcagcctcgatgatggcgattcgaattcgagacaggtcggacctgtcacaccccctgaccttgtgatcccctcattactttaaaagcgccgcgcaccaatcatgaaggtcaccatgaagtcatgaaatgtaagccatgggatgctcttgctttgaatgtgccgcgcgctcggcataaggttcaatccctaccagcgttgtgatgccctcaatgttgccgatctcgtctgtcaggtccacccgctccaactcgcttattagcccgctcgttttcgcgttaagcgtgtcaactttgtggctcgggatatgctagcaaactccatcaaggcaggctcagcttggtgaagcctgttgctctcgccgggtacagcacagcagacctgcacagctgaaagtccgcatgggcttctgggacgacatccccacaggtcgccgggtcctagtctatgcgatttgtttttctaccagtagatcgatcgatggcgccgagccgagatctcacagggaagcgtcgaacgatttcctcgttgatcatcgtctggtcttgtcgagcctgccgaccttgtcctcctgtggtcaatgctctgacgcctctagccacggacttcatactgctctcgacctctgttggatgtcaacccattctttcgccgtcggttccgatccttcagtcgtgtggaggacggaaccagaacggtcgacagcacgttctagctcatgtgtcatatggttgggcgtggatcgaagccatacctcccttcgtacaagtagctataagacaacgaggccagaccaccggaagatggctttagtactgtactagtcctctgtcgaagtgaggatcgttgcagcgctgacgtggatgattgctcaatcgccatcatgccgtgaatcaggcacaaaaaggcagctcatgaaactcctcgagcggcccaacgcgacgatgcctgtccgtcatgacgtcggggccaacagtgacatacgctcgttgtcataacttgtatttgcggtcgccctcgatcatcctcatttccttcccccgtattgtgcgcatgattgacgacacatcggtcgtatgcgccggctggatcgttcaaccgacaatcgggacggcgctttggaacatgatctacccgcgatccaccttgtgtgtaagcctaacctgggctttacgaacggcagacagaaccccctgtgccccttctccatcgtccagttccagtccccctgctaagcgaatgacaaaaggtcttaggggtccctaatcgagtagataaagttgcggatgaatgactggacctgctgggaggtataaggtctcgatgactgttgtcgcttgggatgagctcatgacggtcgtcatctgtggctggggcaagatgatgtgaagagaagcgcgattcaccaacccccttccgaatacggatgaaacgcctacgggagggtcacttttgctggcacgcgctccgagagaagcgatccaggtttcgaaaccaaccccaaccccgggcccgttgccatccagaaaaagaagaagagaaagaagaagaaaaaaggggtaaaatccaggtaaaatcccgtatcgctcgaccggccctaacgggtaccgcgcggaaaactctgtttacctgttgccaggcgcccgcccgaattcctctcctcccttttcgcgtaaaaccccaatcgtttcctgtgcctccccctggccttgaccgcattgcattgccggtgtcgcctcgacatgaccggtctgatcccgctcctccatctcttcgacgcatgggcgggctcaatcttcgcgtccagcgcgtccgatcgctttcacttcaggtgtgatcaccaggccactattacactacctacctatgaggttgtcgcatcgggccggcaagtttcgctccttcctctcgatgagatgccgatcctcgttgacttccgggtgctcagtcggggttgtctcgtcatgacgatcttcgaactcggttggttgagggggggagggcagatcggggaaagagtggtcagaacccctacgaggtgctgcagatgtctatcgattcgtgttcagtgaatcgatatcaggagtagatgaagttacttaacgaatagctgtgcactgcgtcgtcgataaggggggaggcgagggttgaatagtgttctgtagtcttgtttgtaacctcttcgtctagcatatgctaagattcgaatgtaataacgagcttaacttctaagggagataatacaatcgtccaggacgaatctattctactccgctataagtactgcactcgtttccctctctatgctttcaaacgttttgtccttcgcaaattgtcttccgtgactcgaatagtcccgtggaaaagtgagatgtgtagtgctgcgacgttccactcctaggtccccgaatggttctctaggtttcgttttgcaacccgttccgtcactgaatcaggtttgtagttcgtccctgtgtctaatgtcaagtcgtccttcgagttgaaggatgggaaacccggtgactgatccttggtgttcttctatccccaatgtatcgtctatgccgttcgttctctgcctaatttgtgactcgtcttctgtatctagtttccattctcccgtccttgtcttaggtcgttccgtcaagcagagaagtccgttcctatctgtcttttggtaaacgtcttgaaccttactgcttggtacctttcacgtccaagagatgcaggaggtcgactgataacgctgtaaacaacatgacgtatcttttgcttgttcccaaaagcacgcgcgtgtccgtttgtcaaatcacgtaacacgatttgtcatacagtatacgtgatccgcggtgggtcctctgctgatgacgcgtggctgttgttgttgtcgttttctcctgttgttgaaccgttctgtgacacgattctcgattcgtgttcgtgtttcgtctcttgttgttgctgaaaatagtcaggttcgtgacatatcagcggatacctatcacaatacttgacagcagaccacaccttggagtacctgttagggtggaggattccatcggagggctccaccgcagtagtaagcaacagagggacaaaggtggggcccatcatatataagcaataacagatgcctaaggcgtctgtaacattgtagtacaatagaacatcaatagaaggactttcacttggggtatccccttcgataccacttgcggcgtgtcacgtgatgtgtcccttgtccgtcccacactgtcatggataccttgagtattcattattgcttgaacataatgtttcataccttgtccctctcccacttggtcacagagcgggtttggacgttaccgtcaggggcacacataacggcaggtggacagcaccaagcctagactgggagcgccagattgtggagggggtgggcgcaggcagcagcagacttcacgggccatggcgcaacagcagtattgtgcaaaacgacacggactggtgcaacatattgcagagcgtatataggggcacacgttactgttcagacaagtaggtcgtatccgcaaatacctaccacaatataccacggcggatgtcaccccagagtgctccttgggtgggtcacatgatggactctgaggaatggttcttagagagatccttgttccagacacatagaacactggagaggcatatcccatagtgtagaccgatgtagtcgagctagtactgcatctgttatagaattctaggtaagagacctagggtgcaagtcccgcatggagtaacaaggagttagccaaggcccaaccctagcagaaaagctgacgcgtcatccagacacgtttcccaacttagcctactacgtactgtaccggagacttgcttaccaattgctcgtaacactcttcctcctgtactggaatcttctggttttccttccatctaaacatcgaagttaaattcaaattgccccaagatactttgatcccggtggcaatctcttgggtttctcaaagaaacataagctgcatcatccctgttctttgtcaaggctgctatggcccgtcctaacttcaattagcaacttggagactggttgggcatgttcaaacgaatcaggaggaggttccctacggcattcgttacaacaattccctctgcccctgacttgccagctggccaactccacatatattacgtatggccaaagaagggggccgagtggacgatatgagaggtgaagaggaatgatttgaccaggcaaacagattggtttgtggattctgccttctaagctagttggacgacacttttgacatagagtgacaaggcgtcaagcaaggaactcaatatctggtgcagtacaagacttgtcaacagagtttagacagaaacaacatatgaggagggaaatttcgatgagaaagcacaaaggagtgttatctgaagctgtatatacatgttgaaggattttggagcaaaatcagagacaaagcctgttggtgggtcttgtctcctaaggaagcaaatgaatccaagtaggatggtgtgattggtacagcttggcaagcaaaggaagcaagcagaactctgaagaggtaacaaatgtgttggtgccatgaatttgttgaatgtgaaatgcggagcaagtgggagcaattgatccagcaaacggcacaaaggcagagcaaagatattccaagagataaccgggtcatgatactggcgcacttgctcttaaagttgattataaattggtgacacatgagaaagctgactgtgctaaatgccagatgtttttgatgaagttcagtttgggagaagaaaggagatgtttgggccttttaatgcccaggtctacccatgtcgattgtggttgtttgtaagggtgtgatagagcctcaccttctgatagcaggacactactcaatctcctgctactctgcgctccaatgcatcatttgagagatccagtgattgtccacctcacatgtctgtccccatctaaccctttccctgtcttccttcttgtgaagtaacaactagatccacaaagattgattacttgctgggtctaggcaatagcaatggtctattgctagtgctgatcttgccttgttgtgaaggggaatcaatgttgcttgcataaaagtaaagtagtacacaaggggggggaaggaaatgagacccaaatggtctcctatatgggggggggtgttttcctgcagtgaagcgatgctcatcttgttctcgtacttctttttacccctgactgttccccttcttcttcttcttcttcttttcatatctctgcatcgcgtcataacgcatcccatggggtcgctgtcgatgttggcacgggtaggactcgcacttgccctccagactaagggaaatgtcggtcgccgatgacgacgaagatcatgacgatcaacaccactcggaagcgcggccggcaccgacgttcaatcggagacacctgcccgctgggttacagatcactccggcctctccctcgggctctgcacagggcatgggatcaccttcgcggaaaccgtccacggggtcgaccatgaccacggatcatcaataccagggcgggcagcatcaccatcagacttcgcacacggcagcttcgacccccggtcattctcctccagcgtcggcccatgcgactcgacacgccaaacatcatacgggaccgctgcatgatctgaaacggttcttgaaccatcacatcgggcatcacggggatagaccgtcggggagtcggagtgggagctttttccacagggacaagggcgggagcgagaccccggccatccatccggccgtgctcgccgtcgctcgggacggcatggccacgccaggcggtggattgagtggagtccagacacccgggtcgcaattgcgaggaggagatttcttcaccctggcaggaggagccggttcgacgaccaacgcgaccaacacgcccggtaatgggacgcccgtgagcgccacgacgacgacggtggacagtctcggcgggtttggttcggtcgtcgcgagtcccacccagtcgtccgtcaatctgcccggctcgcccagtcccgttcagcataatggaaaccctcagcagcagcagcagcagcacaacggtcactcgtactcagtcaaagaccatcaaagaccgggtagtctacccaagacgcgcgaccaccattcgacccacaccaacaatctcgtcggtttcctcaagcatcacaatcgtgatcacgacaagagctcgtcctcgctcgcctcctttttcggaggcagctcggctgacaaggaggaaaaggccaggctcaaggaggaaaagaagcgttccgaacgagaagccaaggaacgggaacaacacgccaggctcgaaaaggaacgggaacgagtggcggccaaggccgagagggaaaaggaaaagagcgctcacacttcgcccttgcccacgcccgtgccctcgagaggcgcgtcgactttggtcagcccgtccatcgcgactcccagcggcgccaccacgcctgtcggacccggccatttccccgagcccagcgcgctcgaagccactcaggcccatatgagcaaaaagtatggcaagtggggcagggtacttgggagcggagcaggtgggaccgtccggttggtcaaggccagcagcaagacgggtgggacgacctacgccgtcaaagagtttagaccaaagcggtcaggagaggacgccaaggactatcagcgcaaggtcatggccgagttttgcgtcggcgtcacgttgaaacacatcaacgtgatcgagacggtcgatatcctcaacgatcacgggcatttcttcgaggtgagcctagagcctctagagagcacccatcggaagcgtcgccgctgactcttcacggcctttagatcatggagtacgctccttacgacctgttctcggtcgtcatgtcgggtaaaatgtccaggcccgagatgtactgcgtctttcgtcaaatcattgatggcgtcgactatctgcacaagatgggactcgcccatcgggatcttaaattggacaattgcgtcatgaccccagacaatatcgtcaagcttatcgatttcgggacggccaccgtgttctattacccgggcaaacacaacattcccgcctcggggatcgtcggatcggatccttacctcgcgcccgaggtccttagcaaagatcactatgatccccgtttgaccgacgtctggtcggtcgccatgatcttcatgtgcatggtgcttcggagattcccttggaagctcccggacaccaagacggatgcgagtttccgcctgtactgcaacacgcatccggatctctgcaagaagcccgctcgctcgggagccacgtcgagaagcccgtcggtggctcgctgtgggcccgtcagggattccgacgccgcctcgatcactcctacgttgaacgacgagaccgaaagcggcacgctcaacaagcagcgaatcaagcagtcgctccaggtcacaaaagtcagcgaagacacggcagattcggcttcatccgcatgctcggttgtcgaaccgttgcaactgtcggaatcacccgagaccgagatggatcccagcgtgttgcagttggctcgtcccggagactcgaccgcaagtttgcccccaacgaggctcaatactgaaaacgacgggggtgcacccttacacaatggtgatcatcttcatcccgatgaggcgcgaggtaaccgaccgagggcagcgacgtcgccctaccaggaccaaccgctgccgaccacgcctactcgccagccacattcatcggccgctgtgcctcccccatcacgcccacgttcagactcggtagcgaccttcaacgcaggtggagcggactctatcttccggcttttacctagggaatgccgcccggctctgactcggatgctgtccgtagaaccgaccattcgatgcacgttatcagaactcttgcgcggtcgaggaaaagacggcttgcactgcgagtgtggtgcggatggctgtggcggcgaattctatacaccagcgattcagagacagatcgaagaggtcggggaggaagaccatggggacgaatggttgcagagtatcgcctgctgttcacatcccggtggcgctcgggatcaccatcagcatatcaaggtgcaacccgaagaaggcaaactaaagaagaaacttttccactgagttgattgatctcgagtgagagggatcgggctcgcaaaaacggagagccacttgtatctttatcgttataggaatgcgaaaagacttcaagaattgtatacaacaagcatggcacaacgaggttttgccgattcttgccatgccctcttgctccgtcggtcgctcgttccgagcggagcccccatcgtgatcgaggaaaattgactgtacatatcacctcgcttcacatcaaggaagctcgatgtcctacaccagcggtagcttccccgttagggagagggccggtgctacctcccacaaactttcggtagctgcaaacgtgtcaagctttatcaacggtgttcccccccacccctaacccctaaccctactgaaccctcaccaccagtgttgtcatctcatctactaagctgcgacatcgatcaaggtgaatctcgacgattcgtggtgtgcccgacggcgcccatccagcggatcattcgagtgatcaatcagatcgtctttttgaaaatgagccagtcgctgtagggagtatcaggtggcactccccggtggcaagaatccaacgatcacaacgcatgatcgcgactgcggtaccagtagcttcgaatgaccgaccgggacgtcgtgtgagaacgaccactttctctacggcgcctaccccgttcactccgtgcacggactttgtctcgagcgcgtggcaaggatcattgaatgccagccaagaagtcggctcaaactttgattcacttactgccttgtatcgtccggaagggagtcatcatggatatgggcaccgagaatgcccgattgcaagacatcctgcaatggcgcttacgagaagctcttgaccgatcctcacaattgtggtccgggcgaggtcgatgtcagtcagcaaaggtctgaacgtaagcggaaaagtcggactggccacaaaagttgtgtctttgaacagcatagagtccgagcggcacgtgcagcaacggagtctgtgtaaagcggtgatttcatgagacggtgcggaggcgtcattgacacatattgcgctgagacggcgttagttcagaatcaagcatctcagactttgtttgtggataattcagcacgatcagtggcagctgtgaatctggacaagcttgcatattcagcacttgctgcccaaacgagtctgaagacgcgctggcccatgcgacagtcttaatgttgggcgaggtatcgtaagagctcgcgctcacgggatcgaagggcgaccgccgcaggcgatccactggaactggtatgataggaaaggaaatcttccggatctgtggacgacttgcgcaaagaaaagacgcctcaaggactggacatccgcttagagctagtttgagggggagacattcgcacaaaagggtccctcacgatggtggtgccgttgtcctttgtatcatttgcgcgagcaaactgtgaccgtcgatttgtgtcggtcgttttgcgtatccgctgtctatttccatcgatctaagaccgatagtcagaaagtcctgctccatgaccccgatgatatagctcaagccagtgaagtacaaggagatcccaacagagtcatagtttgtgaggtcctcctcataacttttctatgcaccaggcatcccttgccgataggccgcgaattcgattgttcaaatactccgtcgaaatacatcattttcgacgacgaccacgggtctcaggtcacatagtggtcagatataatacattcgctgttgcttgatatcacaaggcgaaccacttttcaggttgtctcgtcctagtcccccttgtaagcttcgacctcgatctcgatcttcattgttgggagagccagaacggagacgccaatcgaggtccaaatcggtctgtgccctgggagccgttcttggagttgcttgaccatgattgggaaggattcggcgatattcacgtgatatgaccggatcgagtaaacatcttgccagcctcttagtccggtagcttgtaagacccgatggacattgttgaaagcgttctcgacttgaaggtcgatattgtcagcatcgcagaatccggtgttgtcccaaccaccttggcctgagcacttgacgatgccaccgatgacgacagcctgagagtaatggtatgcgtcgctgtgcttttggccagcgccggcttcgttcgcgtagatcaagctagacatctgcgatacattcgatcggaggtaaattggcgcccatgtcagtactgtgaactgtaaagtaaggagacgggagacagaagggcaatctcacttcttttctctggtttgaagcaaggcaaattgacgaagatgattagtgtggcgtcgtgcgattaaatgcagttgccttctccaacggagaccgctcgatgaccttgtacatataagtacacaagatcgatctcaccagccagaacgcattgtcaatcagctgatcagatgcaatttagtaagcaggcgaggtagagagtgagggcgagaaagacgtcaggtgttgcgggtgtaaactgacctgtgagattggttgagcgtattcgaatcgctccaaccccgaacgccgaatcgccgcagcctaacctctaatcgttaccgaggccgagagcgtcttcggttcggctccttgaagcccgcatttttgctcttgcacgtcaatatgtctcgaagaacttgatttccgttcaatcaccagtatcaacggacactctagattctccccttgcatcgccttgttgcggcatctgataaacatggattgcaacttgttccagctaatcgccatctgaccctgccacgaagaacacgctcatttcgccgcagatgaatccgcctttgttccactttatgcgagtcctctgcggtcggcttggcgacaagcgagctatcttcacagcatcaacgacctcgctccgaactatcccgatctcggtcagttaccagatctctagccaatcccgtcgtcacagtccgcgttcttctcaggtcggaacgggacctgatagctggagggagcgggatatccgcgctagacttgcgagataacaggagattttcttactctgggatgatatatatatagcaatggcatcgagtccagttggtcccccgttcctattctgcagtgtcgctttgcttcaaacacgaaacctaccaccatggatgccctcgccgagcagaaagcatttgaacgtcgagtcgttcgcaagatcgattggcatatcatgccatggtgagttggcgttctctccgggtccgttcgcgcgccaagaccgccatacttacgtcgttgccgcttgcaggatcgttctgagtaggtcacagatcttagggcagatagctgaatcctggagtggatgactgacattaccaaacggcgcaggttacctcttgaactacctcgaccgaaccaatcttggaaatgcacgaacattgaattcggatcggcctggtcactcgttggtggaaagcctcgggttaaaaggagatcgatacaactttgtcgtggccatcttctttgtgcaagtatgaaatccggccctcgacgatgacaacgacgaggctgaacgttccttgtacttggcagtccctatgtgctgttcgagtttcccagtaacatcgcgtgagggatggggagtcaggggggcgagaggcaagtttggggttgggatctcgcctagaaccggatgatgccagcggcctcctcataggggcgagatgagatcaagaggagattcaggactttggtcgtgtggcatcttggtagcaaaaattctcagaccccggcccctaaccgcggacagttcgaggactcgaacgacgcgatcagcaagaccggacgacgagatacgtgcggtttgtatgcgtttctacagatctacaattcaaagtatgatgagatgagcgctgtcatgtcatctcgcgcgaactatctggggagattgtctctatcgaccacctcgcagggagatgggggataactcgatccgttctactatatcatcgcgtggcagaatgaacacggctgcgtggaatctgtgctgtgtctaccgatttccccgaaccgaccacgatgtccatgacccacgccttgtcgactgcttgaccacatcgcacggtcgcagaaagcatccagatgatgccgtatttccggcgagagccccggcttcttatcctccgcaggcttggatcaggcaaggagagtgtcaggtcctggccgatcggccagatcttcgggaccgaccttgtctacaaacgcatcacagcgtagaagcagaaccaggcgaagaatgcagtttccacgggaagggctgtcacgatggctctggctagtcggacggcggggtcgacggggcacgttcgatggatcagcggttcctgtcccatgacaaaatattcgctcgagcaccggacctcctacgagtggcctcgtcgcaaacgatcatctacatctacgtcacaagtgacatggtgaacgagaccgaggcagaggtctggctgccgatcgggccagatatcctcagggaataggaacacggtggtagagggactctagcaagcggtcggatcgtggtcatgaacttgagctgcgtcggttttagttcctgatcgatacgatcgcaaacggggttggtgccggcttcgcacgtcgtgcgctatcaggatcaacacccgcgcgcaggctccgggtaagacgagtacgccgacatgaaacgcgtcgaaccgtctcccgacattcctgttcactagcggacaggacggacaggtctctcaatggcagcagacggcacacgaagcgaacgatggtcgggaggacaatcttgtagatccagccggggcaaactcgttctacgggtcggaaacgaagacggacgtatcggcaaacaagctttccacaggagacgacgacgacgacgacgacggtgagggtgaacacgacctaaatcccgacgttcaagatcaactcctacccccagactgaccccctagccgaagccagacacggcgcaaaaaaaggcgacgcaacgcaaccccacgcaacgctgtcgcatcgtccaagacccaatcgagcatgtcataatgtccacgacgagtacgacccgatcgtcgtccacgcggtcctgcacgacatgcgccttcccggaggatgaatggatgataggtaggtaggttgtaagaaaagagaccggggatgcgaacaccacgagaaaagggactggttctctagtcgaacagtccgaatcccatgtcgtcgtcggactctgcgaataaggcaacaaccacaacgacgagtttgtgaaacgacgatcagccctctcctctcccctcttcgttcgactcggactcggactcgggaactcaccctccttggcctcctccttcttctcctcggcagcgggctcggcggcaccaccggcagcggcggctccaccggacgaagcggcgggggcggctccgcccgaagggacagaggcgagcttggaagaaccctcggcgatcaactacggggcgggcgaggaggaattcacgagtacaagtcagtccgagttgtccccatccatcgcctcgcctaacctggcctcgcacggcctcgcttcgctcgactccggggactgacctcgttgatgtccttgccctcgagctcagagatgagcttctcgatcctggacgagtcgacctcggcaccggcggcctcgaggaccgaggtgatgtcggcggcggtcggggtcgactttccaccgagctggaggaggaggtaggcggcgatgttcttcatttctaccgagcgaggcggtaaggttagtttggaaacttgacgatgcggtcgacctgggattatgctcgaacgtacttgattgaaaggggctagtaaaccaatttaagccgagtagagccggtatacgtcaacgcctgcggtgggtttcgcgaacgacgaaagagagggaaaaaaacacgacggaccactgactgtgagtttcgaatacggatgggtacgagatgacaactggagaaaaaggagagatggaccgggggggtttgggtgcttaccttttgattgaaaatggggttttggtgacgacaaagtgtgagagtaggacggggggcgagtcgtgggtaggtctgggtgaggttgtgggtgttcgaggtagagatgaggtgagggacgacgaggtgaggtcgagtgaggttagcggttggtgttgggtgggtgggtgagtgggtgagtgggtgaggtttgcgtgaatcggtcagtgccggcaacgttcccagcgacagcacaggccaggccgagtagtgagatgatgagatgatgggggatgtgccgcgatggagacaagaggaagcgcgtacaggccaggtcgcccggggcagggggtcacccagagatggcgatgacgagagaatgcgcttggtgattgcatagcaagctagggtgaacgagtcacgcgggctctcgaatagaagcgcaatagtctagtttccaagcgcgtctcccgtcttcacgcctgtctcgacgttgcgcttagtatcgtttagcgtaacgcgcgcttctagtctccgcccacttcccctctctctctggcgcggttgatgctgttggccttagcgggggctcgaccaagcttggcccactggcgaccaaccaaccacctagcctatcctacgtcctaccctacccactcaccgaccagagcaaccaagccctgacctgcttgcatacgcgccgccacaccacccaccacctttcctcttcctcctaaccccaccaccacgaggggaataccgggggtgccggggtgacgagtcaagggacatccgcggcggcgccgtcaatcacccagggtccatcgtccgcggtcgtcgggacgacgtttgtcagtacggacgctagggggagtacgacgctggtcacgggttcgacgaccgtagctgcttctcaggtgacgggagggaggaccttgtcagtagccccaggcttttccattcaagacgaggattggtatgctgatcggaatgtttgaccatgtcggttctcggtgtgatataggacggtgacgaggacgctcagtgatgggtcggtcgagacgaccgcggttactgatggtagcaacagcggatcaggcagttctggcggaagcagtgagtgaccacccccttgggttccttcccttgcctctctttctgagcccgtcgaccgaggtatatcgagtgattgaccgacctcgttcgattcagacaccggagccatcgtcggaggtgtcgtcggtggagtagtcggcctggcgctcatcgccgccttgatctggttcttgttgcgccgaaagagaaagaaccaggccgatgagtttgacgacatgatggtgagtttgtcaagcagatgatgacccactttcatcaggggaagggcgagatgctgacgaccattttcgacttgacgttgaacccacccagttcgatccgtcccgaggtcatggtcgtgcggcgccgggagcgaccgacttggtcgaccccgaacctagcgtcgtggacccttacaattaccccccggccgcgcaacatgcccctgaaatgtctcaatacgctgctggcggacccggtgcgagccaacaagcggcctacggtgcagggtacgccgcggcgggtgctgcgggaggagccgcgctcggtgccggtctggccagttctcgaacggacggtagttctgatggaggcaccgggggcgggattcaacgtggacctagcaccgggtccactttgacttctgccggtttcgctggacgcgggacgggcaactatccatactacggttctggcggggatacccagatgcccacccccgtacctacaggcactggttctagttcgactcacgacagtacaccttatggtgcggctggcggcgcggcgactccctcgacggcggcttcgcgcaagatgagggaagctcagcaagagaggttgcgcaacatgtacgctcagaacgatcatgctggggacgatatcggtggtggatccccgggaacggcaccggccagtccttcagccgagacgacgtcggggaccttgcccagggtgcacgaggacggcgggaggttcatgcccgagggacaggaagagttgccacctcagtgagtacaaaacgtgtacaggtcggtcgtgctctgccgacgagatgactgacgccgtggtgttgtttgtacaggtaccactcgatcccggccgatcaacgataaatcgtctgccttttgtcgcggacatttgtcatatacggacagtttcatttccctcgctatcacactagtcattatattgtcgtcgtcgtcatggtcgtgtcgggtttggattccttctttgtgaattgaattacgatcgttgtcaaacccccatctatgcaataaccatagctcacgagtcgctcgaatgtctttttgtccagcggggacgacaagtccaacctgccctgaacgggatgcgtctgccaggtgaaacgtgtttcatgacttttccccccttcagtcggcgtacaaaccaccttgatggttcgaatcgtacgtggtctcaccatattctgacgaggtacaacgaagggaaaaaggtttgacgtcggcgacggacatctctgaggtcgtccattcaacctcttaccggagcaccattgctgaatatggtagactttttcctcattgccgatcctcatcctcggcaaagagtagatctccgggccaaaccttggccattggaagaagtggtcactcggtggtatccacggctctggcagcactagaggctgctagagtttccaaacatgtaacccgcccagtagcaaaggccgtcgcgagcacaagccacccggctagaggccaccacgtgagtccaccggttcaatagctgcagacaacaacagtacatcacctccagccaccataagaggctgttgtctgtattagcaacaatctggaccggtcgtacgagtttgggaggtgggtatcatctttgatcgggaggaagcacttgccactgaatccacgcaccagacaatacgtttcgccaccggaccgtcacatatcactacccgggcatgatcgctaggatcgcctgacagaagagccctcccggtcttttgccgtggttgtagcgtagtgataatcgccacgccctggtacgtacgaacaggtagagataaaatgacaacaagcccggggcgggaatctaaccggaccagagtgatacaagtacaaccgagcgttcctaccaactcctccacacacgagccctctccaactttctagaatctctatctctaaaggataatagcgacaccgcggggacgtctaagccatgtcctcgtcgtccgccctgactttgagcgcagcgtcggcactcaggtcgtcaccctcgacgaacccgccgtcttccgaccagtgggatccgagtttaaccttgaaggtctgtcgtcccaggtgcacagggacaatcgtcgagcttgttagtctaccgtctgggttcgcggcggtcgaggtcgaggtcggacggggagatcgagggatcagacgatcgactcacggcatgcatgtaacccaacatcaataacaacctcgccttttccccactgagtttctccccctccctacagacctgggtctctaccttgagggtggggacacccttttccagactagtcatcagtccacacgatctcaactgaggttccatggaatgggggaatagctcgtcttcggcgttcttgatcgggccggcggggagggtgagggtcgtggcggcggggaagttttgacgggcgaatgcgggtcgggtgaacgtttggaaccattcgagggtctctttggggtcccatgaggtgaggaaaagaccgagcgggcctttgaggcgctgtagtgcaggtcgaccgccctcccccttgccctctccttctttccacgcgagcagaatcaaacgaacaagattatcatcgtgtccaacagacgcgacaagctgcaagctagggacgtgtcgaaccatatcatcctcgtcgtctttaggtctctctggcacccgccaaatcacgacctctcgcatcatcactgaagctcacaacacagtcgatcgttcaacatgtctcaagcagacaccaaaactgacgagtacaggggtaccgttggcccttgcggcgtgtaagtcttggtcgatccagggcacaagagggaaaatgagtctctctaagcgtttcaagagctgatctttccgccgccgcagacgaaccaccaactggcctgccatttccaaccccaagctccccgctgaaggctcggcttcgttcaacaacgtccacctcttcctctgtatcgctctcttcccccgtctcctccaagccatcttccccttcccgttccgcatctccaactcgtggacatggtactttttcctcgtcgccctctttggcgtccccgtcgccatcggttattggtgggtcatgagcaggatcggaacccgggtcaatgaaaagtgtgccctgcccggaaagggtctcgaggcgtatgtcaccatcaaggacgacaagctcaggaggctctacgggggtgtcggcaacaagatccccatgcagactttccacgacgcatactttgagggcaagctcgagttcaagggtgagtacagcgtctacgggtcagcctagagacacccactgaccgctctcgtctcatttctgaccgaccctcggcctgatccaggcgacgtcctcgaacagatggaataccgtcacgactgggccaccttcccgctcaccgccgatcacttccgatacgtcctcacccagcttatccccgacgtcatcttccactcggaaggtcaggacgaggatcaggtcagggatcactatgaccgcggtgacgatttctacgagtggttcttgggcccacgcatgtgagtctcctccacccgcgtcgtggttgtctcgccaggctctttggcacaaatgcgattgcgttcgtgattctcggaattcctgtgaggctgaaccacgtgttccggattcctcgcttcattgctgcgtatctcgtaggatctacacctcgggaatcatctcggaccctaccaagtttgaaaccctggaacaattgcaggacaacaagctcgcgctcgtgtgcgaaaagctcgacctcaagccctcggacagattgttggatatcggttgtggatggggtactttggccgcctatgccggcaagaactatggttgtgatgttaccggaggtcagtcgagtgcaaacccgaagcctcgtccgggcagtggtgaccgcgcttgacatcgtgctgactcgcgtcgtgggtctctttcgttccgacacgcgccggtagtcaccctcgccaagaagcagaccgcgttcggtaacgaacgtctccgcaagaacggcgtcgaacccgcccagggccgaatcctctgcaccgatttccgtcacctccctgccgaagccggcaagttcaacaagatcgtctcgctcgaaatggccgaacacgtcgggatcaggcgatactcgacctttttgaaccaggtctacaacctgctcgaggacgatgggatctttgtcttccaggtcgccgggatcaggacgtgttggcagtttgaagatctcaactggggtctcttgtaagtcccaggcgcgtgcgcgcgtgattggtatacgggtcgtaactctcgagctgatcgtcgttcggatgggcgtttggtcagcatgaacaagtatgtctttcccggtgccgacgcttcgtgcgctctcaactgggtcattgccaaggtaagtcgcatccctaaagaaaagtttgtttcgcgtcgaagccgatactgaaccttcccctcacgaccgtttacagctcgagcatgccaactttgaggtccgaagcatcgacgttctcggagtccactactcggccaccatccacaggtggtacttgaactgggtcagcaacaaggaaaaggtcattgccaagtacggagagaggtggtacaggatctgggtgttcttcctcgcctactcggtcatgtgcgtgtcgccgtccccctcaatcgccacgtcaaaatcattttcttcggcttggagagactgatcttctgcattccctggggttcatctctcgcgacagtgtctcgcgacaaggatcggcttccgtcttccagatcaccctccacaagaacttgaacgctttcaaccgagtcgagggtgctttggcccataccagcttggacaggctgcgtagcggcgacctcgacggtctcaagtgagtcgagactatgtcgggcgcccgagagtagatgacggaagctaggagctgacgcttcgtcttgtcgctcttgcaggtctgtcgagtaggacgttccttgtctcggaagcgcttgaagagccgttgcagaaaagagcagtaggaaaaggagactcgagcatcccgttccgagtgaggagaacggcaaagggaagcgcgtggtcggatggacagaaaagaaaagaagaccccgacccctggtcactgcaatagacgatagacgagtaggagctcacgacttgctcaagctacgacttggtacaccttgttatctgttcgattggttgcatgttgcataggaatatatagcatataggcatgatcagattgaaccctagatgtcgacccgttgctgctcagagcttgcggcggaaagtccgacgcactgatccgggtcgatggtggcgtgcgcgtggaactcggcgacgaatgggatgcgtacccgcggtacggcattaaagaggtggtgaccttcgagtgaacaagatttaaaagttgttagtctcattttccttctctccctgcgccccgccccctccacttgttcgctagctcgtgtagtgccgagaagaatttccgttcgaggcgcgtcgacctcgaaattattatttgaccaacaccccttctcctgcaggtccatctacgcccccaaattcctccctacccaaatccccacctcacacctcacccacctcaactacgcattcgccaacgtctcacccgagacgggtgaaatcgtcttgagcgaccgatgggcggatgtggagattcatcatctaggggaaccgtgggccgagggagcgggggaggttttatatgggaatttcgcagtgttgcaggggttgaagaggaggaatcggtatgtcgactcgatgggggagcaagagaggcgttttttaccggggagagacggcggttcgttgatcacgcttgtgcctctttgactcgtcctcggtcgtccgtcgtctttaccttgttctcgctcgcaatatctcccgctcatccgatagcaacctgaaagtcctgctcagtatcggcgggtggtcttaccgggataacttccggcctctcggggctgacgaggggaaacgagcgatgttcgcgaagagcggggctaggtcggtggaagatctcggtttggacgggtgagtctcattgggtcggagcggggtatagcgctctctatgggacgacgagttgatccagagagtgattcattctcggtctccgtttcctcagcctggatgtgagtgtcccctgctcgggcggcagaaagcctctttggtggcatatcaacacgtcccactgatcccgctcgacctcctcgaacgaccctccgcagatcgattgggaatacccgcaaaattcgtcggaagctagggcgtacgtcgacctcctcgccaagtgtcgatacgagctggacgacctcgcccggcgtaaaggtagacccgcggggacgtacgaattgaccgtgagtccccccccctccctgtgaagggcgtgtgacgattaggaggcaccgcggtctgacaggcgggcccgatgcgtcgcgtgcaggtcgctgttcccagcggaaaagacaattacgacaagttggatatcagggggatggcaccgtacgtcgatttctggaacttgatggtaagcccggcctcgtggtgtcgaatcgggatcatcgtgctgatgcgatcggtctacgggtagacgtacgatgtaggtccggtaccatgaatcctgcaccgcagtcgtgttccacgctgacccgaaccgattccccccgtaacttccgcagtttgcaggctcgtgggactcggtctcgggacatcaagcgaatttgtactccgcccagcccggtggagtctcggtcgacgaggctgtcaagcattacatacagaacggagtccggccggatcaggtggtcgtcggtgggtggcgaaccccaggctgaggggctcgataccgagtgtcgagctaatactacgcttgggttcggtcgcaggggtgccgctatacggccgatcgttcatgggcacacacgggatcggacagcctttcaatggcgggtcccgacttttcctgccgaaagacgaacgagactgatggctaaccgcgcaaaattcgataggcacgggagaagggtcctgggagaatgggttgtgggattacaaggcgttgccgctcccgggctcgcaggtctacgatgacgatcggctgggtgcttcttggtcgtttgaaccgtaggtcttcctgccccgtcgcgtcggcgctgttcacttgacgctcagtcggtatcgcgcctatgcagctcgaacggccggctgatcactttcgacaccgtaccgaacgccgtccggaaggccaattacatcaatcaacaaggactgggaggcgcgatgttctgggagttgtccgccgacaaacaagctcccgaggccatcgtcgaggccatgacgaggacgtttagcggggggctgcaggtcagggacaatgagctgcattatcccggaagccgtgagtcggatctcggcgcgcacgagagagaagtttctgaagatgcgcgggtttcggatttcagggttcaagaacttggcacagggtcgattttagctcggcagaggacgaggttctgtcagaggcgcgtgcgtgctaaggacatacctgatcgaatctggaaactgttgaagaacatctctcctctgacaaatcggtcaccaaaaaagctagagagatcgcagtccaggagcctcttgccttgtggaagggaatcaaggatgggctgaatgggctgaaaggacggcgttgccgcttgaccaagaagaccttgaatatcatgggagagtgcagagggctagttggtgtcgacgatcgtctatcacatcaaggaacattgacgagcgagatggatgtatcaggtttacgagaaatgacatagatgcggataggcacggtcatacggatgcgtctcgcgctgtcgaagaacgcatcgcaaaacctcgagatatgtcgctgttctgaccatgcaattggcgataaggaagccgtttgatctggtcaggcgcacgggcgacgtagcagatacagacgctgcgatttcgtctttcaagcgatgagggcacttttatcgcccgaagcaatcatcccgattttggcaaaggagaactgaagactagacagagaggacagctgaggatagcttagcgactctgccaagtccatctcggaacgcactcagaatgcccaagacgaaatctggaagcgaggaggtcagtctcagaaggtgcctcccagctacttttctttagtacagaaagcagcagcatacgccttcgacttcgtgcggacgatcctgatagggggacctgacagggaggctacctggcgggacaaatttgcccgagacctggccacaagaacagcgaggacttgaatggcaagcttctcggggatggaatttctcgatacggcccctcaatactacaatgacaacaacatgaaaccaccgcgcgtttgccaatagaagccaccaatcttgccatacccgatcacatgaacatgccgccaccaccaccgccaaagccgccgccgccacctccgcgaccaccgaatccgcctcctccaagaccccctgagcggttcctcctccctccccttcgcgccctgcctccttgccactctacagcctcacaccaagagcggaagcaagctacaaaatcgtcaccgtcaccgtcaccctcgactctctcactcatcacccactaccactcgctcgggataatcgatgtcgagacaagtttcaatcgattggtgaccagtgaccaaaagctgatagacatcactcattcctgaccacgtaaacacgtttccgccgcatcattcccgtacacggggaggtcacgtggcgggccgcacggaatgcctctcgacgtcgacgaagatggcgacagtcaagacgccggtccgtcctaccgtccacccaaactcaagatgaagctcaaagagaccaagctcgagcgggaggaaagacgatggcgtaaagaacagcgcaggctgagaaaggagagtaacaagatttaccgtgcgaatggggtctcgccggtcgcggggatggccatcacacctcctcgaggtggtacgagtagggaagagagtttgagtccacccaggaagcgagccaagacgacgtctgttgatggcgacggtacctttgaacggacccgttttgatcctcgcaatgcctacatgcaggaatgggacgaggatgtctggcaaccgcaaccttctgcatacaagagagacgccgaagcagcacgggtcatacgtgaggaggaggaatggcgacaaaagatgtttgacctgatggctgcagacgacgacggcccgatcgatctgaccagcggatgctatcgatctccgccaccacccatgcgcaccgctcggtacgatatcctcgacgacgatggtggcggcgatggatcacctgctgctccgcatattccagagaggatcaagcgtgcagccggctggaatcacgacaccccagactatgccaatatggacgacgaagagtactctgaatcaattcgatatggaatgtggaggaggcggaacaaggacgaggtcgagaggcaggaacgagccgctaaggccagggcagagcaagccgagaccaaggctcgcatgaagcgtatgcaggaagaggaagaaaagaagcgagtcgaggtactcaagcgggagacgggcaaggcagaggggaagaggaggaacaaggaattagacgattacgcaggaaagtggcaaagtttacgagacggaaggacgcatgctggtggcgacgaccaggcttcccctatgggattccgattgctcgacctaccttggcccgtcttcctcggggcagataccgcggcgtttcatccgaccatgttgaaacacgagcgtatcgccacattcttcgatgcgctccttcagcacgaaatcgaaaagaagcagaaagtggaagcggcaggcgccgccgggactccggtagacggactcgccgatggcgagactgtgacgatcaagcgggttctcagagacgctatcctcgcctatcatcctgacaggttcattggtcgatatctgaaattggttcatatccccgagcaagacatggtcaaagaggccgttattcaatgcagtcaaatcatcaacgaccttgcgagcgaaaataaggacaaataacgaatcggcaatagactagagccacgatatcatgccgtagtgacatgatgatgtacagtatcatgccgagtgctcccggtacagagacaagtagtctcaaccgaagttaccccattccaaactgtagcaatctactctacccttcttccgtcgtgcgcccacgtcccgctcagcgacagaattgccatccgttcgaagttcatactcggactctccttcctcttggtcggaatccgtaccatcctcgtcgaagcaacacaagagatgtgccttttttgttgccgttccgagccttccgaaagcgacaagctccagcggcctaataaccctgtccggatgcgtcatggtcgtagtaacgaaatggctatggtaccgtagcgggtcacctggatatcccagaaactctccgccaaatttgatcccctggcccatgtacatgccttcctcccatagctttctgaatgtggcgcatctcgccgtctcgacgaggtcatcagggtacgtccagaccccagccgtccgcgccgattcaaggtcggtgaacagagattcgcccggacggggcttgaaccatgtctgtggtgtcaacgtcgaatttgggtttgcgggaaccatcgtgaaatatggtgtgttggcggcgtcgtctcgcttactgcctgcccgaggaggtccactcgcaggaacggtcgggctgggagagtctaccacaaagacgtccagctcggcgtccacctcgccgccctcgcgctctttaccctttctcttgttctgcctcttttcttccctctgccgtttaacttcgtcccgtttgacgctctggatcttgtgggcaaatgactttttcttctcttccagagcttctgccatagaggctcgcaaattatgcacgtattctcgtcttgcttgatcctgctcagccacctcgtatggggtgggcggctgaagcgcatccaaagtatgcaccaaatgacaaatacctacggtggaagtgagatgagagtcgtgacttggaaaacgtgctcggtcaactcggctgaccttcttgcaccaggagaacgacctcttcgggcatcatgaccaagggcagtcccagaaagacattctgctgcgatacaccaggaagtgtaccggtcgtcaaaccgcatatccgatgctgtacacgcaacgtagcagcatctggaagggtcagaggccatcagccgcgaggtaagactcgtgaccggataagagtggatgtagggactcacgttgagcgtcccagcagaaggccttcttgccggagacatacagaggtatcgtagccatctcgagcggtcccgcagccgagcgttattcgagcgggcgggtggcttttgtatcgtcgaggaaccctttttcttgcggcgagagaagcggcaccgggatacatggttgctcagtttgagagttcaaggtcgctcccactttcatacgcaaatctcctgcaagggcatcaactccgccgaagcattggaatcattcgctcgaaagccacacgctcatgctgattaacgcacttacctattcgcgccgtgtctcgaattccccacctgaaacgtccagtcgtcgatctaatccgaggcgatgtgtatttcgtttcattacaagacgttttcatttgaagacagtgggagtatacaacgtaacacatcattgacgtacagaaagatggctcatttgatataaggcttgttgcagcggaaagaagaaaaaaacagacagagtaagacaagacatggcgattggagtggccgggtgatgggggggtcagcgaagttcgaacgatccgcttcctcgttgggggatgtggcatagagacaattcttggaatctggagcaaggaccagcagccgggtgagcacaaaagcgcactagctgtggttagccagtatcgacaacgtacggttcagaattttgatggtggaaatagtacccctgtttgggcagtcgagagacttgtcagcgattcgtccttgatctagatcaagcaatgatcatacactcaccttcaagacgggcaccccgcttccgttgcccgcttcccggtcgctcttcttgctcgatcgcctcctctcatccacgctcggtctcgtcgtcgttcccgagttcggtagagtcgaggaagccacgccaggcggaagcgctggcatcgttgacgacctcgtttcagcttgttctgtgcccgtcgagctttgtgttctcggaccacccggcgagctgacccccgtggccgtacctctcgcccctggccttccattcaggtaaaccgtctcgcggttccttgccccccctgccgtaacggcaggtcccccactcgccattccctttggcgtaggctcttcgagctcgagctggaggtaataaaacccggcaaagctcgccccagagatatcccgtaccttgtgatcggggacgaggaaccgttctttccacctcatgaacacgaaccccctctccctctcccccgtgggaccgcgttccttgtcactcatcgtcaaacctggacgtcggagttcgttcctcacctgatggaaccgatcgaaccggctccaatgcctcaggtcgtcctgctccgtcgcctgcgcgtagtacttggtccccgtcaagaacccgtacgtggggccgatgatctccccagagaagaaggtggtgagtttcgggtgcgtgtcggtcaaatgggagatactcaggtagccgctcaaagtggaacatgtgaaatcgacgtcgaggatccggacttcgacttcgtaggaagatcgacccgatgtctgtttcccgcgaaagatgctccctgggtagagcgtcccgcgaccttgggaaggacgacggagacgtccgatgtcgagcaagggattggggaggtgttcagtgtaggacgatcgggtggggatggtggatgggccagcgcggtgaggttcagatttagcgatgtcctccagtcgtgggttgtaggtaatgggcgtcggtgacaggttggattcgaaaggatgtgtttcgctaatggcagttggtgggtcgattgcagctccagcaaacgtcggggtcggggtgagaatttgggtataggcggtagatgacgtagaggggatgctctggaccagacccggcgggaagtatgaagaaggaacaaataccggatgttgggtcgatgagctgatgggcacaggtcctgaaggacgatcaggcgaatctcctcgtgatgagagaacgcctcgtccggtcgggtcggtccagttgggcattcccgcattcgatcctcgagcgatcgcattcctctgctcagcacaacgcgcacacaacccctcttcacccggcgcatgtacgctccgtaaaccatccaacgagtttccatgtcgatcgtcctgaactctatctccatcgtacccatcttgattgttatcatgcccgacgttccccgtccgacccgaatggttggcttctctaagcaagacgtccccgatgctcccaccgagcaagatgggcgtaggatcaaggtccagcgaatcttgacatccggagcatttgttcggattggtaggtgttgagacttggttcgacgtgggagcgatgaaggtgcttgtaggagaggtaggggaaggggtagaagcggcgtcagggaatggctccagaggccctgtgacgggcatgttgacgagatggctgagtttcccaagcaatgcgttgctcgtcagtaaacacaatgggagggatacattgatacgtacgttgttatcccaagaagagtgtattcgtggcgctgtgatttctttacaccggtgaggacaatgatggcaagcagcaagcagagtagatataatctcaaagtccttcctccttcattagtatgtggtctcctatcccttcaaagccagggcgcggcgatcgagagcgagagaatgacggcatcaaagggggaaggaaaggggctggggaaggcaggagaggaagagggcggaagtaaaatgatgggaatatcgatcatttacatccgggaatcatcatcatcccatcatcatcctatcgctatcgtcacggatcatcacttcgatatcgacctcctcgatcacaatgtgcagcgactcgaagcgggacagtaacacctgcttgagcgttgttgttcatgttgaatctcttagtcagggatatttccagtcgatgttatttgagtcggccatacaaagaccaactcgtcaaaccccacccccccccccccccgcctctcttaggcaggggaaaaggcaaggggagagggggggcgacgcgtacccttccccatgaaacacgcgcgcgtgtttgaatcaggcgggcagacgcgtagcaatcgtcaatcaacggccgcacatcgccgttcgataggggtcgactcgcggactggcatgtcaagatggatacatcatcaagtggctcagattaggtcagtggatcaatggcttgaagaaagatatggggatgatgaaagtatggggatgataaagatattggcatgataaaagtatggggatatgaggaagatgttcgtctaaatacagacatcggcatgttacaattcaatccggccgaacgaccaacggcccaccttttcccgttcatgggacattcaccctcgcttcgatcccgctcttgacccccttcaatgcctcttgactcaacctcgaccgggcgccagaagtgaaactcgtcccgttcctcttggcctcggcccacatcctcgagatcctgctgggtcgcctgagcgtaccgagcagccctagcatggtcgtcaacagcaccacactccctgcctgatgcgccgcggcgaggggtacggggacgagcatgagcaaggtggtgacaccgagcgagacttgaagcaggccggcccccaaagcggcttggctccacttgacagcgttgggtggcaaggctcgtcgaagagctgggcgcatggcgagtaggggtagcgaagcgacacaagcaaacgtcgtcatggcctagataaggtatcgaggtcaacacccaacctgtttgcagaccaagcacgtgcgacgagcgactcacaaatgctcgatggtcaaactgcacggtagtagggttctcgagcatgttcctccaccacttgtcacttccgtcctcctttttcgcataacgagagtccatcatctccccgagagggggcacgatcgaacctcccatcgtggggaactcgttgtaaatcagaccggcatcgagtccggccacaaaggcgcctatgatacgaagccgacgagacatcagccatcacgtgccatacaaagacccagcgtggtagacggttgtggactcacccgaaaccgcagtgaagagaacagcggcagcgacaacgctagcccatttaccgtaccgcctgacggccggctgatcgagcacgctcatcaagctcttgacctcgactccagccgtcttgccttgacccatggcgtacttccagtccctgttgatgcccagagcggtgtggaccattccagtgtagagcaagagagcagcgccgagatgcattgcgagacggtattgagagacacgggggaccgcaccgggggtggagaggatctcttgcgaaagaccggatttgaccatgtaccatccgaggaaaccttggaaaccgatacctccggcgatggcgagcagcttccacctgacgttcgggccgactttacccctcgagacaaagtagatggcagggaggatgaagctacgatggcagagagagaacatcagcccgacgtcaacacgtatcgatggcaccgtgtcgtcactcacccgacaccgaggactcgaccggcgatacgatgagcccattccatgtaaaagatacgcttgaaagcggggagatccaattgagagttcatcctggcggaacgcaatgccgtcagtcatggttctctccaaacacagagagggaccggtccgactcacaagacaccttcgggggtgaccctgtacttctcccattctaccatccactgctcctcgccgatcggcggtaggattcccttgacaggctcccattcggtaatactgagtcccgattcggtcaatcgggtcacacccccgacgaccacgatgaagaataccaatccagaggacaggtacaaccacttggccacggccggggtggtcaagataggtaggctatccgtcttggagtctgaacggctgtagctctcctcctggttgaatgccgatggcgggatttgagacaaggtagcagagtttttcgaatgggctgtgaagctgatcgatcgtgtcgagcagatagtcgaggaagaagctcgagcgttcagccccgtctggccgaaagcgatcctgcgagacgctcgagtcgatagcgatcggacgaggcgatcggaagtctttgcaaggtttcttgctgttcttggcttgatggtctgagccgctgctaatcgcaggccagacccgaagcatgtcgttacggacgccatggtagtggttcctcgagtttccgaacagttggtagtatcgtccagagtgtcggaatggctccacacgttttctcgagatcgaacccaatgatcgacgatatatttcaactcaggcaggttcgctcgagatcgcggaagcaaatcgaaatatgttctgatcagatcagatcgccgcggcggctcgggagaaaccgccggtgaaaatgacgggaagcgccgatcgtggcgtcgtcgatatctgaacatcgaggctagctggttgagctgagttgggacatgtagcccaggagccatgttatggtcaacgaccgatttgtcttccactagctggtctgtacggtcttttcagcctgtacacggcttacagcgctacccctggcaatgccgagactcacatcatattcatgaagctatgctggaatctatgggaaagtctctaaatgttgtaactgagcgcgatctgtctcatgtcttgaagtgcgaacatcgggatgacacggtgaggatgctgactcaggattccaaagctgaactacgtggaagaaaactgtgcgaatgaaccgatatctgtcttgacggacggcgattaagttcaagagaacaatcccgcctgaagcggagcgggggggggggggggggggctcggtggagggaggagtacaagctcctatcttgcatcacaccatcatcttctgccatttcctcgccctttcgcttttccttttcctcttcctcttgaacttcgcgaacctttttcggcggctccctttccgccctagatccggcgaaactcttggccaccgacatgaacccgtcagcttctaccaggtgaagctcaaggttggggcggagataaatcaggggtcgatggccctagattttggagcgtgaaacgagagggtggggtcgaaagaggatgtcaaatcgtaagagaatcgaaaaattcgcgttgccggcgcgctgctggcgggttgttccgtgtcccggtctttggctcctgccctctgcatgattcttttcaaagaccgaggctctttgccgttctctgcgtcattgtaaagtgagtgatttcgagaacccctcgtccatgttagcaacatggccagcgtcgctgatacaaacagtagaaagtctcacaccatttatctagttttgccatcagggggtgtccggtttgtttcatcttggttcggcgcgaataagcgggaaatgtcagaagacttgcaaaacatgacatccgctggtgggtcgtcctcgagcttgatatagccgatatcaacctgctcgcgtctctatcttcgtgcacatcgcttcgatcgaaaatccggagatccggtgtgtttcctgagaataagggtagggccataacagagcctaaaagccgcccagccatggctacgacacgttttaaggtttgttgattgcctaggctacccgtacgtcaaactaggattgagggagggtacatgagagtgcctcgccagcactcttccatcctaacggcggcgagacccgacgaacctagatatcatatcccactgcgtccggcgcctcaccacaaaggctatgagttccgacagagggaaaaggagggtcaacacgaacctacagctgcattcaggggacctcctggtaaccctcaccacaaggcttggtttgcaagcgcgaaacgatctcgtgacggggtttcaagccgggcacgacgaccgctcgctagcattggacgaccgaccaaacacgctcgtacgaaaatgcacaatctcatccgggaaaaaaggaaaaactccaagtcatctaacgcgtatcatgctccatccctcgctcgtctggctctcgactatatacatttttttcccactcgctcgtcgggctcggtatcgcaaggacgcgcgcgcgcttaaccgatgacgagcttggcctcgtcgtcgttgaaagcgtactcggggatctccaagttgagctgttgaggcgggatgaatgaacgtcgtcagtacgggcaggacggacggcgtgtgcgacgagacgggactcacgggagcgggaccttttcggatacgacccgaaatgtcgtagtgggaaccgtgacaagggcagaaccaaccaccgtctgaggggaggccgacgagacgtcgtcagtatgtgcgtttctgtgcctcgatcgtgttggcgttcgacgacgactcacagtcaccggcctgacccaaggggacacaacccaagtgggtgcagacaccgagcatgaccaaccactcgggtcgctgaacacggtcgtcgtccttctggggatcacggagggtcttgacgtcgaccttgttggcctcgtcgatctcgtcggcggttcggtgacggataaagacgggctttctacgggtcggtgtggatgcgagcgagagtcagcgggcaggcgatggatgcgaacgggacgggacgagcgggggaccggactgaccctcgccacttgacgatcaagtttttaccctcggggatggcgctcatctcgacttcgacctttgccaaagccaagacgtctgcactcgcggccatgttgctcaaaatgtcgctgacggtcgacttggcaccggtagcggccaagagacccatggatccgaccatgaagtattggagggatcggttcgtgttgggagatttggcgaggtaaggggtgaaatcggggatcgaggtggtctctcggagggatcgtgccgaggtcgaaaagtatcgaggttggtagatgccagtagagcgggctgcggcgggcaagaggtggtggattagcatcgataaaggggagtttgatcgaggcgcgagacgcgatggaaagcgagcgcaggagcgggatcgatcgtggcggcaaagttggcgagtttgatggtaggcgatcgcagatcgaccggggtttcgtcgtctcgtcgtctggacagtcatatcctcgccgaggcttgggagacgattgcgctcgccgggctcgcgaagagcgatgtttgggctcgttgcactcgcgaagaggaggattgtgctcgctcggctcgcaaagagagatgatgatgctcgttgcactcgcgaagcagaggattgtgctcgctctactcgcagagggtaatgattatgctcgctccgctcgcggtgactcgctgacgctcggaagaagaggattgtgctcgctgcgctcgcagagacgaggattatgctcgctccgctcgcggggactcgctgcgctcgcaaaagagaagaatatgctcgctggcgctcgcgtacttacggttgaccctgctcacgtgcgactggcccgactgcctcgagacccaacccggaatggcgtcctttctgggcccatgatcgccgtgttcgtccaccgagtgacctgatccgtgacctcctgcctgaatccccttcaaggcgtgattgacggcgctgacggggagtcccgaggcgagggctcgcgaggtgggggcgaggttgattcgggtgagcgagagggccatcttgggggtgagggtcggggtgaaacgggggtggaggtcggtttcgaagcgggatgaggaggatggggattcagatagcgacagcgacgacgacgacctggatggacgaccggcattgcccgtcttttcccgacgtcgtcccgctcggaacggactcgtgcccgaacccagtgaacaggggcgctacgcatgggaatggcgacgagagaccttgttcgacggctctctgggcgagattggactggcagggagtatattccgggtgatgggtaccccggggtcgtttgagggggcaggggagtgggaggtgagtcgggcgtgtgtttcacatcatcatcaatcgggagttggcagtctttcgcatgatcacgaggggtcatgcgcaagtcaaaaagggcgacagggaaatagagctgattcgacctgtcccgttttcggcggtgcgctggtggttctctgcagtccttcggctcgttaccggatgccaacaagatttcgtttgaacgtcgtcgacgggtcgatttggtggacctgttgccgttccttcaggcggtcgatcgccacgacgacgacgacgacgacgacgacgacgacgacgacgacgacgacggtgatggtggtggtggtacgtgttggtctgaggtgttgaacggattgatccggttagagccgaaggagaggatgacgatgacgaggttgaaagagagtctacgtggatgacgtcacgtgacgggtctctctctgtctctctctcagcagtgaccactccatctgacgcccttgtacgcgtgagaaagaccatttcgatgcagtcaaccccgcctcagctgccatgacgtcgttttgtgtgtggcctgggagatttgcttcctctctctctgtctgtctctttctcttatgtgcgcgtcattggcatcccatcccatcccatccccgtaaaacacacacacacacacacacacatacacctctctctcactctcttcaatcgatcgacaacatcttcttctttaccaacactcaactcttgcatacaatcaaactcaccacaactcacacttcaaccacctcccaaccacctttaatcttcatcacatatatacaatgtcctgggccgacgtcgctgccaagaacggtaagtcacgcgatcgaaacccatcaagaaaaaggtcaagggaaaagaggactcgtcgatctctgacctcgctttctcttcttcctcgcgactcatttctttgtccgccttcgccgtcgtcgtcgtcgtcgaatgcagctcctcccgagtcggagcagcctcaccctgaccagggattgctcgagggtcagcactttgagggcgagacccccgctcagcacgggatcagcgattccaaggtgagtcttcccaggtcgcgcgtcttttataacaacccagccggtcgtctgacgaaccgaaccccccgattcgtacgtccaacctcactctgcactcgcccaggtgtcggtgatcgaccgagagactttcgagcaccccgcccccgccgagcccgtcaaggccgagaccctccgacctctcgacctcaactcggccccctcgcccaacgaccctgccaacaacgacccccgcacttcgtcctctgcgcccaaggctaccgaggctcccaagggatccgagatcaaggtcccctctgcccaggaggtcggcaaaaaggtcgacgcctcggtcgagaagggtaaacaggccgccaaggatgccgaacgcaaggccgagcgagccggggacaaggtcgaggaaaaggccaaggaggtcaagggggccagtaaacagttggcgagggacgcttctgaaaagggacgagagttggccgatgacgctgcggagaagaccaaggaggtcgccaacgacgtcgagaagaaggccaagcagttgaagcgggaagccaaggtaggtctcgagccgagcgtcgacgtgtctcgtctgtcgtcgttcagctctcacacacgactcgcaatttctccttcatctcgtgttcaatccgccctcaccacaggccgagatccagcacgccgagaacgtcgctgcgcaatacattgaacgggcgaaggagctcgtcctccgacccggtgccctcggcggtctgatgggagtcgccaacgtcggtctccttagcacgatcggttactacgcctacacccgtcgaaacgtcccttgggaccgaaactacgtcggcgccaccgccgcttccgtcctcgccctattcggaatcgagggcgtcgtcgccgaacagtttgccaacacccccgagggcagggaagagattgagcgcgccaagcaggagggaagcaagttttacgtcaacgcgagggaggtcgtcctcaggccgggtgtagccggtggactcttgggcgccgtcaacgtcgccgtcctcggagccggtgagtcgtcgtctgcgtctggacttcaagtcgtctctttacgatctttccttgctgatctcgcgttctcctgtctctctctctcgctgttctttctgatcctccgcgcacgcccaatcagtcggttacctcggataccagaactgggaccgaagggtctgggaccgcaagatcgtggccgggatcgtatccggtctgatcagtttgagcgccgtcgagggtctcgctggaaacgtctggaaacagaagcgagagggcagggcttgagcttgagcttgagctcgagttttgactttgagtttgagactgagactgagcttgggtcccccccccccccccccccccccccaccccacccaaacaacatactttttttttttataacccctaacccctaacccctaaccctactatcgtaactccagtatggcgaaggtcacgtatgttcataaacacgacagtttcaccaaaaccagaagagcagtcgaaccctccacaaaagctaatgtcaatcgcctcacccacatacaatcgccaaccatgacatcctctgcagctcccctcaagttccctaaagactttcactggggttacgcgtctgcttctgcccaggtcgaaggatctgtgagcactcctgaatgagaacgcttcaagcacgacacttatatccttctgtcggcacgatcgtcagatcgacaaggatggaaagggtgccagcatatgggacaacttcagcaaaatgcctggcaagacgtcagacggaaccgacacctcaatcacgaccgatacctacattcaatgggaagccgatatcgcgctcatgaaatcctatggtaaagtctaccttgtattcattccttgcttcaggctggacgattgctgacccaccactttcaagcgcaggagtcaactcgcaccgaatctccctcagttggtcatgaatcatccctctgggagggaaagacgaccctatcaaccaagtcggcattgattggtaccgccgcttcattcaagcgcttttggacgcaggcatcgtcagtctacactagtcacatttgcctgagacatcactgactctcgacatggacgtcgcgtttctgatagacagacaccctttgttgtgagtctcgacgacaggcttatatttggcagtgcgctggtctccccgccgagtcgattctgaaaggtctttctcggatagactatctaccactgggacttgcctcaagcacttgaagacaaatacagtggttttctcagccgtaacatcgtagccgactttgagcgttacgcccgagtatgcttcgagtcttttggtgacctggtcaaaaactggttcacgatcaacagtccgtataggctttttcgtcccccaaaactcatcgaggttgacttttcatcgaaacatccagagccgaacgtattctccatgatgggatattgctttgggtctcacgctcccggtcgctcttcgaaccgtgaaaagtccactcaggggaactctgaacgagagccttggttggtcgggcacgacttgatacttgcacacgcgaccgccgtaaagctctaccgtgatgaatacaagcagaagcaaggtggacacatcaggctcgtcgtgaacatgctttggggcggtgagttcccgatcgagtagtgctggaccgctaggggctgagtcgcgatttcttttccttcttgccagagccgtttgatgacaccccagagagtaagttgtaacgagttcagcacaaccatgcactcttttgacggcctgattcgtacgcacaggcaagactgcggccgagcagtttatggccgagtcgagcggatggtatgccagtgtgctactagagcaaagaaattcaataatgctgatgccccgagtctatctttgataggtttatacacccagtagtgtttggcgattaccctccatcctgtcgagagttctttggcgatcgattgcctctgttcaccgtcgacaaacaagcactgatcaagggatcctgcgacttcttggggcaagttcctggaaagacctgtccagtctgtctattgtcgctgaccggcccgccttcacgtctggatatcaaatagtatcgatcattacagcactttctacatcaaaaaacacctcagccctgccgaaccgggaagcatttgggggatcatccaccccacagtcgacctcggcatccatgacaaagatggcaaggaggtcggccccgtaggaggcgtcaacttcgtgagaatcgtaccatggggtttcggcaaattgctggactggacctggaagaagtgagttgaatgatggcagggtttcaagcgattgaagggctgatgttctgacggctcctgtcagatatggactgccgatttacatgtaagtcacgacctgaggatccacaggctgacaggatacgtgtagttaactcgaacacctgtcatcgtctcatctagcacggagaacggcgccgtctgtccaaatgagaacgagattccaatgccagaagtgctcaatgacgagtaccggatcgaatatctcacaaaatacgcagacgagattgccaaggccattcacaggggcgtgccggtgaaatcacatttgatgtgggcgctgactgacaacttcgagtgtaagtgacgggcagtcctttaggagtcgtccgcgtgtgctaatccaaagaagctgtctcatagggcaagaggggcacaaagctcgcttcggcgtgacgtatgtcgactatcaagatggatgcaagaggtatcctaaaagatcagccggtgtgatgaaggactattaccagtccaggatcgagtaaaggatggcggaccttctctctcaataatttgctgtctgtcggctcgtgttacggcggagcttcgctaagtcgcgtctaatggatatctaagtggcaatgtcggtacggatcgtaggtagtcacaacaggagggaagccgagttcggctaacgggagcgaattcggttggggtgatacgaatccgggttgatgtacggataaggaagtaatgtcgctataggtagctaggatcggatgcttgttcagtacaaacggtgagacgtctactacttagcgagtgtcctggattgtaacctctcccccccccttccgtggcagactttgcctggcagcccgaagagccttacctgaccttgccctcatactttatgtgaacaggtctcgagactggtcagggacaacttgatgaagcgggcaaggaggttcaacttaatcctcgatgacgtctcgatcacccacgtagcgtttagcccagagtttacccacgctgtagaaggtgcgtctcgatccgctgtcctgtctcgcaagtcgggaggaaaccaggctgaacaattctcttctgccgcgaccccatctcagccaagcaggtcgcccagcagatcgctcagcgagccgccttcttggtcgaccaggccatccaggaaaaggtgagacctgcgcatcccaccgatgtctccactctacgctcatgtttctgatccggccctcgttcaactcttcatagcaatccatcatcgtccgagctcagggagaggcccgatcggccgaattgatcagcgacgccatcaaggccaacaagggtttcttggaactgcgaaagctcgaggctgcgagggatatcgccagcatgttgggtaccagcggaaacaaggtcgtcctcgatgccaacacgttgttgttgaacggtcagtcgtcaacgcgacctcgtcgtcccttttctgatacagacgagcgagagctgataaagagattcttcgtggttcgtcaccgatacagttcaagacaaggccaagtagaagcttgcgagacagacgtgatggcgcggacgaagtgtgcaaacgagactttgtgtaaaagtaaatctaccccgactctcttggtatatcgatgcacatgcagcgagaggtcctcggtccgcaacccactgccgcgcccgttaatctggtgatcgcttcactcggttcgcacttgttgatctcgacgtcgacgcctatgtcgacccgaacccagaccagtgccatgtttaaaacaacgtgatggttcgctcgagtcgatcgatgtcgttcagttcccgatctagggcaactgggtgaagagatccagctgctgatgcaaagaatccggtcaccaggaggaagtagaccgtgtttcatcgcggaaagttaatggaatgtggctaggtcgtagacgtgcccgagggaggttgctggactggatgcgagacattgcgcaaagacgatcggtcgaagaagtctcaggcggaggacgtgagcataaattttcatggcttctttggcagcgagaccacttcccttttgtatccgtagtgatgaatgaaacatggtctgccgaatgtcgagacatgcgagacattgggcgtgtgctaactggaaaccaatgctccgcgacggattccatgctgcggcattagaaacagggcagatggtgagacatgatgcggtgattgtatgttatatttcatgaacttaccatacttattctgtcctctgcttgtcttttccagtccggcatcccctcttccgactcctcacgtgctctcgcgcacgtcgtccagccccagcctgtacaacgctcccctctcgcagtccgagacaacctggctcaagcaacggatcgcgctttatatgatacctcgacgtggcaccgatgccggcggtttcacgattctccgggaggagttcaaggcacattttgctaagttggtgtcggggtccgccgggtccaacaaagattaaacgggaatccatatggtattccaagaagtccgacggaacataatctcccttcaaaagctcatcgcgatcaaaacggaacctggccacatttttggtatcgtgtcgcacccacgcccagtcgtaccggcctttctctcattcaactacctaccgtatcttgtttggctcctcgttcacgttgtcccgggcgagcggaaatcgttcgatcttttctacacgacagagcacatgctccagcagtcttgcagtttcagcgtgccatgtatcaagtcatcgggacaaggcttgaaacaggctccgaactattgaatcgcctgggtgcagtcggtcccaagaagcttttcaaacggccgacctgaccctatgtgaacatgccagacatgatgccccactaccacgatccaatcaactccgggaaaagaaacggtctcacatcatgatttcatttccattcggcatttctacttttactcgcgctcgaacaaaggcgcgcaagactgatcaagattccgttgtttgggcaagctccgtaagggagcttgtttaacaggtaccagagttggtgatcttgacctcggctttgggctctgcggtacgttgacgcaacagattcaaaggtcagcctgatgatcaaaacgacgttccggggacgcgctctacgtactaccagagtcggtaccgtatccctcgatcttcttgaccaactcgtagttgtcgacgactcggccgaaaacgacgtgcttgccgtccaaccacgaggtcttgacggtggtgatgaagaactgagatccgttggtgttgggtccggcgttggccatcgacaagagaccgggggtctacagcgaaacaatagatgttagtaatcagtcttcgcgaagacagtgatcatgatggggggggaaggcgaaggtgaacgactagtctctggtcaatcgattcaatcagagtcctcggaattcgaacacgcaaaccaccacattcggggcaaagtcgatgatcatgacatgccgatcgtgctcgtagacatcattgctgctctacaatccaggtccacctgagctagctagtcgaggaaatcagaggaattcaatctcgtccatcaacctatagacatggcttccttactcgttcccggtctccgatcaggtacgggcggttgtgcctctcctcgagcaataacagatggcggcaggctaatgtatactctcaaacgattgcatccatccaggcaatgcttcgcgaatccagcgaacctttagtccgatcgcaggtgaggaggagaattggaccgaaagcgaacacgatgggattagcacgctaaccacatgtttgacattatagcccgatcgttctacacctcgcagatcgctcaaaagccccacactccttctgctgccatcaactcgagcgactacagcccttcaaccacgaccaataagatggcgctcgctcagcaggggtcgaaccagttgagcttggagacgcctcagaacggagctggtgcgtttctcgatggtgttcggatttgcctcgtcacaactctatcgctcattcgcgtgtgcattttgccacttatagagtacgtcctttccaccatggacaaggtcgtcaactgggctcgacaaggatcgatgtggcccatgacctgtcagtctgcccgacctcgatcgcttttaacacgcgcccttatctgagctcgatcgcttgctcccgtttacgcagtcggtctcgcatgttgcgccgtcgagatgatgcacatggctgccgcacgatacgatcaggatcgtctgggagttgttttccgagcgtcgcctcgacagagtgatatcatgattgtagccggtaccttgaccaacaagatggcccctgccttgcgaaaggtttacgatcaggtcagtttgcgcgaaaggcacgtctgcgggctaccatcttgcatgctgatcgcgagtcgcattgtagatgcccgagccaagatgggtcatctcgatgggttcgtgtgccaacggaggtggatactaccagtgagccgcataataacgctctgtcccccctaactcattcatacttacgaccctctcggcttgcagctactcttactcggtcgtccgaggttgtgaccgaatcgtgcccgtcgacatctacgttcccggatgcccacccaccgccgaggctcttctctacggcatgctccagttgcagcgaaagatgaggaggaacaggcgaagcgtcttgtggtaccgacgataggagctgtccaccttggtcggtgagcggcagagaaccacctcgaccctcgcgaatcgacgggatctgctttttggtcggaaaccagacgccataatgacacgatgtaactaccggatgtgatatcgggacgaaccgtcctgttgtatgatgatgatctatgactcgtgatgtgccacacaaagtctaaagcgatatgcctcgaggccagagactggcatgcatcgagaccaaatcagtctgtgacagacttgagtggaacaaaaactacgttgggggaagggcgagatatggttgatgggacacgccctcgtctcgccagaattcccgcgtagcgcccacacgacgtacgaccgttccaagcttttgacaagttgacggctttatcttgtagctgtacccatgctttcgatacgtgggggttaagtagctccagactgcacacaggctatacaggctactaagctactaataacgagctagtacaggcattgggcatgagctcccggatgattccaccacaagtccggtcactgaaaagaaagctcgtggccgcgactacgacttcacgccattccttgacgacatttcctctcgcatcctacttttccttgcacttgctcctaacagcattcctgctgttcagtttcggacttcttccccgatcagatgcattctggagaaacgagaatgcgtccgaaaacggcggctcaaagcaaacggtatcggtggataggccagaacacccgttcctaactcccatcacgagcgacccattcaagacgatggtgctggaagtcattggggtgggcttttgcatgttctggtggagcggacatctcaggagttggtggagcgtggccaaacgaaacgagagaagagcggctgggtctggctcggctcaagatgcagagcctgtcgtgagagaggatctcgctcgccgcctcgaggtatgttcatgctttaggatgtactccgacaagtggccacgtcagaactgttctcataaaccgtggccatacagtccacaaagacggctggcctcgctactgcagctgcaattcctgtgctctcggcaatcctcgttttattgggcatctcggttacatcgtgggtctgacgcacgcaaaaagtagccatccagcgcagagccatgttcaaactcccccccggccaagcaggcaggcaggcaggcacaagggaggcaagggggcggcacgacggggacgggatcagggaaacgagcgagcgagcgagcgagcgagcgagcgagagggagtcgatcactttcgagcaacaacccgtacacagatggacacatagagagggaatacatctacacatactctgtgcagctccatcgaacacccatccgcccatccacccatccacccatccacccatcaccacacccctagcacctacggcacacttctgcctcataatcatcccgtctcgcactcgatggccacgctcaagggagccatcccactcccaaagagtaaaaactcggactaccaaacgttggacgacgaacggacgcctatcgagctcgaccttgggttggacaaagaatctcggcgtacggcagggggaaatggtcagcctgtagtggacgacgaggtcgatgatttggtcggcgtgaacgggaatgaggaggaggcacggacgacgagggacaagggtaaaggacgagctagggaggatgatgatcacgatcatctgcatcatcctcaaccccaatcgcattccaattcctattcctcatcgcaaccccaatcgcaaccacgacattcgggaacagcacgacgaaatcctaccttgaattccagcttggatggagatctctccgtcaacacctcgtcctcgtcttccaacgaagggatgtacctcagccctacgacggccgagagccgtccgccttcgacgacctcgccctcgacccgttcgaatacgaatctgaacacgaacacgaacaccaatacgacctctaccacgacgacatctaaccggtatcgctccaagacgacgacacgagataaagacccgcggtgggacctggacactatggagacccctcggttggatgctcatcccgggtcactctcgtattcgaaatccataggaggacgttcacgttccccgctcgtggacgagtataccgaacctcgatggaaccacaagtcggtgggtgatacggggagacgtgaccacggcgcggacgatcggtcgaggttcccgataggggaggctgcagaggtggatgccgaagtaggcatcggtgggatcttggccgggttaggttcgggggattatccgatgcagaacgaagaacaggaagaagaaaagaggatccaggatgtgagtcgcttctaccttcctcttgaccccgatcagccgtgggtggtccaggcactgacaaccgccgtctggttttgaccggctttcgtagaacctagcctcgctcgctgccaaagaggccgcccgtcgaagagcagcccgatcgtccaaagcgttcgtcacccgtccgtccggcggcctctcgtatacgccttacgagaccgacgcgccgggactttccatgtccagctcgggctcgagtggtgcggtcggctcgaacggcgggttcgctcgacgggcttcagggtggttgggaggattgacaggagccgtacccgggtttggcaggcttggaggcgtacaggaggatcacgaggatatggcagggaggaggagaacccggttggcacattcggatgtgagtcttcggggaacgctagtgtcgctgcaagtatcgacaaaactgtcgctgacggacctcgatgtctcaaccccccgattcgaactcggtgcagtcgccatcgagctccaatacggtctatggcgaaccgatccctcagtcacccgtaccttcccccatccccggcccatcgtccatcagccgaggaccttctccgatcccccgtccaccctcgaccaacccgtttgagagcgagctggatcacagggtctcgcattacgatcccgcgtcggaatacccctcgcgtagcagcccgacccgaacgcagcaaccagggatcgatctcgaaccgcgagctcgggggaacgccgaagctggtccttcccggtcggccgaatcgtcgacgtcctcgtcccgctcgaccgtcttacaacaacaacaacaacaacaacaggagcaacaacaacaacaacaacggcaaccagacttgcagctcgattgtaccgtctcgtccgcttcgacgttgaccaacgacgggtatgtacggatggaagattccgggtggaaaggacctacgtggcgtggaggagccggcgccaaacgactgagcgggagcccgattcattcgcccacgacgttcaacatccacgactcgccgacgacgacgctcgacctcgacagctcgcgatacggctacccgacatcatccatcggcatgggagcgtcatcggaccaggtgttttcccggatcggacctaccccgcggacgagaccgaggatggccccgcagagagaagtcagacgggacaagtggtggtacgcattgtgctcttgggggagcgagttggacgatggcgaggacgggcaaggtgggaggacgaacccgttcgagtaggtccggtcggaatgccgcatctcgggcctttaggttgggggggaggaggaagggacgacgggctcacatggttgatccagtgttccggatcgctaagcgtagcagctaccatcgctgaccggtttcgactcggaagggtatcaacagcggtccagctagattacgaacggtgggagtgcaaacttcgtcgtcaatttcgttgtgatactactgctactacctgacttttgcgatgtacgatgatgtcgatatgcccaaccctcaacttgcaacttgctcatcccaacgtcgttctcgctcaaattcccgcgtgaaaccgaaagcgcaaaaactcgggcaactcttcgcattcaccgacgaccgagatcgagatccccgctactcggatcgatcatatcatcatcatctccatccagcgacacactgaatcatgactcgcatgactcgacagatctgacagaccgctaggaacacgcgcaatcgtacggtatggccgacgagatgaacagattgaaatgcatcatatcgtaatggatcgaatcaagtaaaggaatgtcgtgacgggggtcatatgcaaacgttcattcttccacgcccacccgagcgcgcacgtcgatgggacgagctcgacctggctatcggactcgggaatttagatcaagagggcaccggcggcggccccgacgagagccgcaccgacggtccaaatgccggtagccttgacggccatggcggcgttggcaggagcgctggtcgttccgggtgcaccggtggtcatcgaagcggttcccatagagttactcctagcggcggtgctgacgccggtcgaggtgacgacggtgctctgcgcctgggttccgctggtcgtggtgaccgtcgaggcggtgacgacgagggtggcagggtcgaccgaggtggtagcggggacagagacggtggcctgaccgttctcgacggtgaaaaagttggcggcgcggacttcaccgagaccttccgtgtcgaggtaggcgctcaacgatcgggcgccgaaagtgagtccggtaggggcggtaaaatcggactcttggtcgatgaggaggaggacgtaacggtgggcaccggttccctcgagaggtccaggtccgacgtagtcgatgctaaagtccgaggcaggcgaatcgacacgaatgtcagtcttgatgtctctctttctatgtgacggtgtgggcggcgctaccgcaagaccctggactcacgcagtggtagcggcggtcaagtccaaagcaccatcggtaccgacagtcaccccgttagcgacccagtggaaagtctatcatccgagcagcaaggaaccgtcacaaccagcatcagctcgacatggccccgctcatccagcaagcggcgctctgatctgatgagactcacctggttgttggccgagttgtcggtcccgacgatgtcagcatcgacgagcatggcagtgtaagcatcgccctggttaccacgaggaagataagacgaggatcagtaccggtagagtgacgcgtgaggggtgacggatgaccagagatgcaagagggccaggctggggtcgagcactcaccgtctcgaactcgtcagtgcccgtaagcctctgtacggtgacagtagggaaagtctgggtatctaccgagtcgccgagagaataacaacagcaacaataatgaagaaggtgatcccagacatgtcagcgagagcgcgaatcgggggcacgtctgacaacctcggactgaccggcagcggcgatgggttgaccggtggtgatcgcggatccaccaaagacgacactgagggttccttcgaggtcgacatcgtcctcggacaagagaccggggatcaggccggcctctatcagtgatcaataagagagagtgtgtgttgaaaggcgagacgagaggcaagacgcaggtggggttggttgtgaggagagaagaggtcgcgatcagttgatggacgcttggtgattctgatcatcacgccctttttttgatggacgagcgcgaagacgagcaggactcacgttgcatgttggcctcgacgagggcgacatcagcggcagtagcgttctgagcctgtgcgaggacttggttggcggcgagcgcgaaaagggtggtgagggtggtagccttgaagaacatgtctgcctttttttattttctaaattccggttgattcggtggtgtgtccgtgagtcgtcaaagttgagagtgtgtagagagtggtttcctggcaaggctgtgagtgaatgtcgttggtatcggatcaagaaggagagtgggtgatgagatatgagataaaggggagtaggaatgaatggagggtgggtgggctgctgtctcctatacacatctccgagcccacgagactagcgctcatctcgtatgccgtcttctgcttgaaaaaaaaaaaaaaaaaaacccctgcctcgtccaccggcacccccacgcccacctccgttgccggcggacaacctctcggccctctcctggaacctcaatgcttttctcacgttgacgtcggcgtcgcccgtcttgggcttgccgatgatcgtggcgatgtgcatggccgagtccttttccgaggaaaactcgggtgccgaggtaggtgcaaactgtcgagtcgcgcgagtcgagtcgacgaggggaaggtcgtttcgttgtgatagacagacgatgatcagggcgaaagcaggaaaaatgatattcagcctcgtcgttcccccttggggaagtccacgacgacaccacccggggactgaccttgcgcttgactcccttgatcttgggctctccctcgatctttttatcaaacttgcccatactcgcggtggccgttctgctcaatgccatgctcctatccaactcttcctttctggcttccctcatcgtctttttctgagcttgactgagggtggagacgcccggtcggttggtcgaggtcgaggtcgacgaggcgatggcttcggccgtgttccgtgcggcctgacgggtgttcttgtcgatcctgtcttttcgagcctttctagcggtagcgatcgggtcatgatcggcctctacacaaaagggccgacaattcgaaagaaagaaaaaaagaaatcacgggataatcgacgtgcgaatgaatcaggaccggaccgcttccaccaggcgaaaccgactcgaccccgaccgccgactcaccatcaccctgcttgacctccctgatccacgcttcctctacatccttgttcttccctcccttaccccacctgggtacccaatcctgcatctcatcatcccataccatcttgtctttacgtttatgactgatccctttctccttggcgaacctctcccacttggtcaacggtttcggcttaggcaaatgtttctcacgcgggatgatggcgtgcgagtgtgagacggggagttgagcgagcgggccgagcggggttcgggtgagcgggagggtgaagaggcgttggatgagggtctgggtggtcgtcgtcgatcgatcgaggaggtaagcctcgaggtcggtgctgcgcgtcgtcgtcgtcgtcgtcgtcgtcgtcgtcgtcgtcgttgtcggtgatgaagaggacgtcgggaacccccaagtcagccagtatgttcccacagtagacctagacccagacctcgacctggactcacgcgtaatcgggatcgtccgtgggtgcctcgtcgaaagcggtcaagatggccgggtcgacggtgatgaccgagtcgtcggctccttgttgagccgagctgccagatagttcgaaaaagcgaaacggatttcgacgcatgtttcggggccggggcggggggagagagggtcgggggcaggtcaaaagagacgagacgttgtcgttagcttcaagggacgacaaaagatgactctgaatgcgatggccgaccgccggtgtttactgacaatcgtgccgcatgggctgctagatctgccgagacgtccatgttgaagctgttccttggtttattatcgtgttgcttggtggtacgatggcacgatgaggagtaagagatataggtgtgaacaggttgcaggttgagattcaaatgaccctttggctgcaaataaatcgcaagggaacctcgcaaaacgaaagcgaaagcgacgcggaaacaaaaacaaaagaaacaggaaaatgataatgacggcatcgagggtaacgagatgttgacggcatataacgtcagatgccgagatatcgttatacagccggcatgcacgagcacgctgccgttacctcggtcataacctcgtgggaaggggcattttacatccgacaacctgtcgatcacgccattttcacttgccgaatttggttccgatttttttcggaagtaaaaagtgtgttgaccttgtttgattggaataacgcggcaacgtcggttgataaatcaaaactcgggttgatcagcaatattcgattcgacatcgtcatacagccagccagcatctacaaacactactaccatcaacaactagagtacaaataagacgacaacgacaggatagtcacggggtgaaacttcgagtatcgccacattccaacaaaccacatcgccctcgcaccgcacccaccatgaccaccccactcgcctctccccaattctcgcccgaagagatcaaacagatcaaccgagacttgtcaggcaagactcctcaagagatcctcacatgggccatcgaccacgtcgagggtctataccagaccacggctttcggattgtgcgtcccaggcctcccctcgatcggcccttctcgaagctgatctttcacgactttttcccgtctcccccctgtgagcgaggtcggggcgggggatgcgggtagctgaggaggatgcgtgcgagcgagacaagacgagacaagacgagaacaggacgacagtgcaggtgggtatcgacgagttacacggctcttgtagaaaagctcgtgcttcccttcttcctgatatcaccaccaccagagtcgctcctttcgtctcgtcccggctcgtctctgcaaaagttcgccccgaacttgaatcgacactcacgacctcctgtcatcctcgaggtcgatgagcttttgagcgccagtggcggggttggcgatgttgagcttcactacgacgtcgaaagacgttcagcaacgagcgacaaggggggatcagcctggcaatcccacacgggcacttgagacttggaagtcgggactggaagactcactgctgggcggtcttgctaaaggatatccgaagaagagactagacggagcgtacgtgcagaagatggacgatacgtttgattgtttgaataggatgaacaccaactgtgacgatgcggaccagagccagagagcaaaggcaggctagcactggggcgtgaggaggaggaggaggaggaggaggtggtggtggtgtggtcagagtgggtgaggctggtgtggtgtggtggtcgcgggcaatcgctgagacagaggtcgaggttcgaggtcgaggtcgggtgctgagagagagattgtgcgcgcgagtagggtaaggtcgacacggggggaagggaagacttgtcaacaaatggatgaaatcaagaaagcgcaagctgggtgagcatctgccggtcaagcgcgattgacgcggccatgacctggtcgcgcttgctggggtgacgcgcgcttcttcggacaatctcgtctactcgcgtcgttcacgccattcgactctcgctcgtctcacgcgtcggacattgcttggaacgacaccagccagtgactgagcgagcgactgagtgacccaaacctcggttcccctcgagtctcagctcggtcccaccaccaccactcaccaacactcgccaggagctcacacagatcgacccggaccatatcgtcaacatccagccgcatcaatctaccccccgccctcgccctcttcttctgcttcttcttttcgtcaggacctcgtcaacactcacctcttttcgcccccggccaccctcaaccaaaagagaaaaaaaaaggaaggaaaatctattcaagatgggtcggtaggtatctcttctttttgctagggaaaattgaaacggtcgatgagcctccctcacccccgagagaatcgtcggggggaccaaaggcaagggaggtgacggagatgccggttaggggtcgtcgttttcaacctattgattttcgagatcgggaagggaaccgtggctggatggggggaacagcggggtgtttattctgcgtgtgtcgcggctggagatcgaagggaaaggacaagacaaggcagttcggatggacggacgatggacccgggattcgggacggggaactcaagagtcggacggccagggtcgggaattcgaggtcgaccatgggaggaggtggaattggaggaggatcgacaaggcatggatacttctttcctggacctacttgaatcctattcgatatggacgacgaggacgaccggcgctactcgactctcgaatctctactccattccattcctctctcactcgaactcgaaacccgaacccacgacccgagatccccggacgaacgaatcacctaggaagatccgtgcgcaaggaggagggacgtcacatccctgcctgcgtcattcggcctagccagtcggggcagagcgactcgggacggacattggagatgaggattccgatcgtcgtcttcagtgtcgtcttgggctcgttccctcgtatggtcatcctgcttcgtagtcctcgtcctcgtttctattcctctttctcctgcacgcacacatacagacgaaaccccccgcccgtgaatctcccagacacccactcccccttcatatctcgaaatgaaaaaaggagaaacaaaaccccttgcctccctcctgcccccccttcttttgatcgggaggagcgcgactaggtggtggacgaagcgtacggtcggacggttggctgatcacctccctcttggctgtcgtttgcgttgttattcttcctctccccccccccctccctcccccgctttttgttttccggttaatcccgacggcttattcattatcccgcgtttaataagctgggcttttgggtcggcggggtcatgaccaaccttcataccatacaatgcgacgagatgcgacacgatgggtaggacaggacgccttggcatgacggggctcgatcggtcggttgggtaaactgatgctttatgatttcgaatcgagtagccgatcggtaggtcatggtcgggtgtcgtgcgttgtgatgttcgccgttctgtgtatccaaaatgttctggcggggaaaccacacgcgcgcgccctaaggccaagagagtttgcgtggtgaacgtggcgccatgtctctcttgccctcccggtcggtcgtgtcgaagacgttcatgattgctaagccccttcgacgacgacgaaatgcttgctcatcctctagatttgacttttgtatcctgtccaccttgttgctccatgacagtggtagtctaggtggtcgactcggcaggtgatcccgaaacgccacctcgatcgacctgcctgttttcggagccaaaagtgaaaaacatccgcgcgcggtgtgcgtcgtcacgtgattcacctagatttcaaaactaggagacaactcagctctgaacgttcatgtgcatacacacaagtgggattctatcaacatgtaacatgccatacctaccgatcaaccttgctttgacaagtccagacttgaaccaaattcacatactataggcacacaatggcacctccttctaattccaagaaacgatccgctggcgatcgatcgtccggtccccagaacaagaaaccccgggtcacccctgccgccgccgccgccaaatcgagcaagcctgcctttactaacggtaaagacgctaaacccacccgacgtggcggtcagaacgtatcgagggaacccaaaaaggcggtcgaagagtctaaacggaaagcacccatcacggggcgcaagtacgaggaggacgccgaggaggacgaggatgtcgatatggacgacttggaagaggacgagtttgatgaggatgtcgagatggacgccggagaaccggtcgagggagaagttccgtccgggatcgatggcgaacaagctaaacgtctttcaaaaggcgagtcgtctgcacatgcagcccccgttgatcgcttccctgacctgacctgactgaccgtcgaccttccatcacgtacagccgagaaagccgctcttcacgcccaacaaccccaccgcgcgaccctactcccctctcaccctctgctcaaggataccttgttgcccctctgggaagacgcacgaagagccgacctttccaaggaagaacggagcaagaagatcaagcagctgtacgaggccgtcaagggtcgtgtgagggaggtcggacgtgggcacaagggtggacgggttttgcagacggtacgtcgtcgtcatcgtcatcgtcgctgtcatcgggatgtcgttcgagcgggggaacactgatgttcgctctgtcggatcccgcagattgtcaagcatgggggcaaagaggagcgtaatgggatcgctgtcgagttggatggattgtacaagcaaatgttggagagcaagtactccaaggtgagcactggtccgagattccacacgccggctcgctcgctgaaacgtcgacgctctcgcctcgctcgtgccacgatagttcctgatggccaagctcatccgtcattggtcagtccagtgaacccatccgtccattttgcaactcgtcagactaacacgattcaatccgtgacgcgaccccgacctcagtccttctgtccgactgtcgatgatctcgcaattgtccccccatatcccccacctgatcgctcactcgcacgccatcacccctctggccgatttctacgaactccacgcttcgtccaaagaacgacgtttgatggtccgtgctttctaccctaaagaggtgctcctcttcgatggactcgggatcggagggacgaccccggagggcaaggacgagatcaagaagaatgtcgaaaagggcgtcgagatcaaggggctcgtcaagactctcgaggggatgggtgaaggtgggatcaggaccagggtgttggatcagttgatggagaggatcaccacgatgtgaggatcgcctgcggggtggctgtgaatgcgtggatggacgggtgggtgggtgatggatctttttaggatgtttcggtcgggcgatcccaggaccttttcgatcggtatgcgtcatggcgaggggtagcttcggggtgcgagagttggtggggggagttgacgacgactactggtcgagtatggttctcaatctttctgcctgagacgatcgagccgagccacgagctgattgggatgtgtttcgaaaccaagatgaccaccccatcctagcctggtggtgagcgctgctcaacttttgatcgtattcggtgatcgggagcggaagcaaaaaggcgaaaaccgaccgaccacttgctacctagctctctgtatagaagctatacgctacacaggacgcttcgatcaggctcatggtgccgagggattcaagctgtagcgtattcaagtggtacgtagttcgcgccatgacctggaccgtctcgatctgcacggtcgatgatgcgattacacgatgcaggagttggcagattggacgacaggtcaagacagcggtcgagattgccttcattaattgttatgcacaatcatggaattctgaaacctgattcgagaagagcttattctgcttgctagggcttgtgggcccggctcgtacacacttcaagttgaactttaggtctcgaggtctcgaggtctctagctagatggtgtgcacgacgacagtgtgtgactgagcctgtatcatcgcctcgacgcctttcgcatgctttgaccaaaaagtaaacacaacgacgcggacgacgagctagaaaagtgaataaacgatttcgacggaaggcaggcagtgatgcatcatgccgtcatcgtgctgacgtgatgaatgtcgtaaaccctgagtttccgcaaactacacgatcagctatcagatgatggtcaacccgcgatgacaaggaaaagcgcgaccatccaccttgtcacctgcgcccgtgcgacaccgaataaaagcgcatcacactcgctcgctcccccttccttcctctgcctgacccaatctgattacaagcgcaacctgctcacattcactcactcgctcgctcagccagccagggccaggtcactcacgtcctccaccaccacccatcgctcagctccctcgctccctttcgccgaaaaaacctgtcaacgatatcgacatcatcatcatacatagcaaacgtacccccgccttcttttcttctaggattagtccgattatcgacctagctttcaagccgacaatcaactacccaaaatgaccaaaaaggtcagtattgccgattcctcttcccagcgccgccgtcgccgtcatcgtcgtcgtcgacgtggacaacggccataccccaagtagtaccgaccgaccgaccaggaaagctgaccgagatgttgtcctctgtgcaccccgtggctttcgtagagaagaggtaccggccgagccaagaagggtcgtggtcacgttggattcctcaggtgcaccaactgtgcccgatgcattcccaaggtgcgtcttttcggccccagggaggggaggtaaaggaggtgggagtaggggtcgagatggtggattcgggatgcgagtgcgcagatcgaggcaggaagcccttattcctcttctctcgcatcccgaccgcctgtttcgctcctcccacccctgatcctcccgggcctcgccacaacccactttcaaacctccctcctaacccgccctccttccctcctgaattctcgcaggacaaggctatcaagcgtgtcaaggtgaccaacatcgtcgaggccgctgccatccgtgacatggaggaggcttccatctacaaggagtacgcccttcccaagctctacaaccggaccgtctactgcatctcgtgtgctatccactccaagggtcagtattacatgacactatatttcacactcacttgctcggaagggaaagaaaaacagaaggctgatcggattgatcgggtggtacgctgcaattatatagtcgtccgagtgcgatctgccaagcccggtgccgttaacagcaggaagaaccgagctccccctcccaggcctaggttcaaggacggcaaggtgagccccgcagcgatggttgttgctacgaagctatacgagacgagctagcgatcgtgcacaaacaaatacggaatttttgaaacaacatgatcgacatctcctcaatactgcggacttggctatacagttctgcaaacgagctctgaccattctttgccatatatccgtgtaccctcacggtgtgtacatgtgtgcacttgatgacatgacacagcctgcccgcccttttgtttttcaaaccatccatcccccgcgtcatgatcacactttgatgctcttggcccttacgtacatggcgcggggaaggcaaaagaaatagatgaagctctttcaaatacatcatttagccagccataatcgagttgtcctcgcttcaatactgtggaacaagaaaagtaccacctcgagatccgtccctctcgaacggctcatccaatcgagcagagaccatattcgacttgtaacaaccttgatctaaaatcgagcgtacgcaagcatccctgtatccatacctaccaccctcgcacccttcaaattagcgaatctatccatcatcatggtcagtccacaccccggttctgtatcgtcaggtggacgaggacgagttgggctgatcgtgctttcctccgaacttattttgggcgcatctgggaatctctgttggaccgatgatatggacgctgtcgtgctcgcattgctatggggcatcgacgtatcacgctcgcatccatatcgcttggtacctcgacctctccgaatgtgtgataccgctgccgactttgaaaccacaccccaacttgaaatccgaattgtcctcccacattgcgtcttccataacacaacccctgatggccaattactcaatttcggacgataaacccgcattcattctggacgatcaacacgcacatatatccacgctcgacgcgtacgggctggaacgaaacagggcggcggcggacaataccctttccctaaagaagtctggtctcctagcggtaagtttcgtgctttggcctgataggttcacgggcccgttagaggtggggaatcttggcatgagcaatgccggacggaggggaaggatcggaccttgtgaggcgggaatgagccaagtcgacgtaaacgactggatattgtcgagccgacgaatgcatggagcaagctaccgggtcgagatctgcctaccgtctacatacgggatattctggattggttgcaacaggactgtcgaatcaaacgaaagctgattcctcccacttcgtcccgttctactcatccatctccatctggcaaccatggcgacattccggcctccaggtggttggtggtccaggccttccaactggcgactcaacactctcgtcgctgccggtggaatcgccgtggccactttgggagtctggagaatcagtgccaggaacgaggtacgtatctctgggcccgacggtgatggttacggcggcttgcaagcgatatagtcatccctgcccgagtcacggaccgcccgcgcccacatcgggcaagtgaggtagcggaactgcactgacccgtctctcgttgattgttgccaatagatccgacatgcgcaaccgacaaaaccgattccatcagccaacgtgagttgattcgtgtccgaccgagagtgagcctcggatgcagtcgctcatccggctctcgtcgtgcacacagtggtcaccgcaagcaagggaaattggagtccggaaggagtgaacatgggcatgggagaacggagatgggccgacgtttgtaaccttgacatcgatgacgaaatgacacggagctgctcgctggacgtgacccttgccatcctcgtaaaccctctccctacagcagagcaacggtggtctcttggcatcccaacttggcaagtaagactgaaaccttgcgcggtccagacgatcaatgaggcgaggacggcaggcccaagaggaagagggcgaaaggaagtcaagacgagtgcaagtgctgagggctcgcgtagatcatcgggtttgacctttatcaatccagagtttcaacaagcatggataatgaccgcggggggggggggggggagggggtacggcggcgggggcggcggtggtggtcgaaatcgatccccaccccctcgacgatatttcgacgaccgcgagcgggatagcgggtacggcgccaggtcgaacaggaacaggatggatcagagtccagagagggatacgagagccatggccatgaggaggacacctcccctggccagacaaccccgccgagaagctcgatcagactcgcgttccaggtcgaggtctaggtcgagatccagatcccgatcccgatctcgatcgaggaccccgccgaggaggagagaaaaggacgaacccgttcgacgaccacgacgacgatcgccttcccgtagcccatcccgcaccccacctcgacacgttcgaccacgccgacgatccccctcgagatcccgatcgaggtccagatcccccaacgtccctggcagacgagcacccttgccccgaggtagggacatgtcaccggacgtcgacgcgccgacgaggagtaggagagcgagatcgacgagcgtcaggtcggataggtccaggtcgagatcgagatcgaggacgccggtaaggaggagaaaggacgacaggttagtcggaaagacggggcagttgctgggcgtattccaagctgacgacgaatatcgacgtcgacgttgtagtgcgacacctccgaggcgtgccagaagcccggccgatcgatcgaggtcgagcgattaagtgaagaagcggggaaggacaccgacctcgatgcatcgggattcaaggtgcagggcggttgacacgcggaggacagggatgacaagtcgaggtcggaacagaactggaagttgaccgctgtattcacattcatatcatcgtcgaaacaatacatgcggttgtaaacacgaaacccctacatcatgtcctaccagctcgtcgttttcgtcttcgtggacgatcgttcgaccgtcgatctcacgtccgggatcttcgcaggacgatcggtagtgaaccacgaaaactaccttgcatattgacgtgcgatacggacctccaatggcaataagcatgtcgaccctcagctcgctcctacattccggctcaaccctcgaagtgacctctatggacatttgcacacggctcgctgccgtccagcacgaacctcgaaggttcgcagaagttgcttgtgcgatcgggaaggagataaaggatctccttggcctctcgctccatagcctggagatacggaggcaagcaatcttcgttctctttggcaaaccggagaggatgaacagggtgtttgcgtatcgtgcgttcggcccttaccgcatctcggctggcaactggccagcgatgtgccatcaaatcgtgttccatgtctcgggaggttcggggggtccaggccactcgccgcgcgtgatcattgacgggccggggcggtctcgacatgacaaggatctctttttcttgaaaaaacaccccagataccagcttgggacacgccgctcacgatgtcgaatctatcgagttatgtaggagagttcagcgcgattagccacgggtcctccaggaaacgggaattgaccgcagagtcgtgggcgttgccccaccccgccccgaacacacagaggtccaacagacccgttgccgccacgcccaccgatcccatcaccgccctatcggctttggtgtcgttcgcctcatcgtcttcgaccgcaccgaccatccggcgcggtcggtggacttcggatctggaacctctgccttcgagaccggcccctgccctatcgacatcgagaccggtgcccaccccgtcgagttccagaccggcgtccaccacgtcgacatcgagaccggcgtccacaacgcgctgtaacaaaaggggacatccaggagcgcttccggcactcccacttgccatttgggacaccagcccacctgcagatcgctaaggctgttgcgagagaggtctcgatcgacttcaagattcaggtggttgcatggaatggcggagagagccctctgggattctcaccccgttcgtcgatatctggcagcaaaggccaagaaggttgatgcttcatcccccctcacttttatgcaagcaacattgattccccttcacaacaaggcaagatcagcactagcaatagaccattgctattgcctagacccagcaagtaaccaatctttgtggatctagttgttacttcacaacaggttatgagcccagtagttgtggcctaatctacactagagttagcaaccacaatcaacaacctcaactatcaggatcaccaagaggatatcactggacatagttggacaggtttatattactggaccactagtcagcatcagacttggacatcagtattcaagcagcaacgagacttgaggcaactaagtcacaggtaaagccctaaggaaataggtagctttatcatcttcagacagcttaaagttggctgtctgggctttcagcagtagtgtgctgaacagctccaggaacttgactggatcatctccttcactcattctgagtgtagtgatcctttcttctatgtccgccttgtagttcctgtcgtccatctggtgaagcttggctagcttgtcccagatctgtttggaggtattgcatcctgcaagttccattctgatgcctgaggagacattgagtctcataaggcccatgaccttctgatccttctccttccaggtcttccattccctgtactcttctaagtagagggagacagttgctgaagagtgtgttgtcttgttcccatcctcttccagtatttccagaggtctgacaggccgtcccttcagttcctctgtcagcacatgcagtgctccatagacaagtgctccatcttcaactgcattcctccatcagagtggaagtcactgcaaaggatcaaggagatcactgttacggcggagcttcgctaagtcgcgtctaatggatatctaagtggcaatgttggtacggatcgtaggtagtcacaacagaagcgaagccgagttcggttggtgtaagcgaattcggttgggatgatacgaatccgggttgatgtacggataaggaagtaatgtcgctataggtagctaggatcggaagcttgttcagtacgaacggtgagacgtctactccttagcgagtgtcctggattgtaacctcgtcacaatacgtcttgaagatgcagtgctgttgcaaatcagtaggcgtaaatagaatgcgatattggaacttgaccttcctagtacaagaacgtcgtctgccggattcggtcaagttctactaagtatatgtacgaaactgagagtactcgtagcgagttgagaacaataggcgatccaagaacggtgaagcgaattcggaacaaagagaaccgaatcgcgggtcgagtgtcgaacatccaacaaagagaagtcgtcgtttgccgagtcgagagagatgtctttgtttgatgtaatcggttgtcgggctatgaggtctttgttcgatatccgtcgatgtcgctattgttctctgatggtggtgatatcgaatatgcattgtgtcgatagtagagagggtgacgagagcgcgcgagccgaagccggtcgcgtaggagccgaatccgcgtcgcttcccgtaacaatcacccagcaaccaacttccacatttgaggatctcagaggaatgttcaacacttacattgctgacatcaagcgtcaggatgaagtaaggttgcagaatgcaatgatggtcaagagaaccagtcatgtgcaaaggaaaggatttggtcaacaaaggaataacaaggaccagcccttcaacaagaacaacctgtcttgttggaactgtggaaaacaagggcactccagcaaagagtgcagatcctctaagataggaaatggatatacccacaaacccaaaggagaacagagtaaaactgggttcaacaagtctacagacaatctggcagcactgcacaggaatatggcaggtgcagccattcaagagatctctaaagaagaatatgctgctccggtcgaggaagagagcatataagagacagcccccgggacgcgaaaaaacaggctggacgacgggtcttttctcctcatctcggcgtgcaaggatgggaatcccatgttgaggaattggctgggagattgggtcggcacgtttctcggtgagtgttcctggtcgagtgggaggtctggcctttcccccctgcaccatcggatcagatcagatcagatcgggtggggatgagactcccgtgtagtgactcggggctaaaaggggatatatcgaacgggcaggacacaagggtgcggtatggagcagcaagatctcgctcgatacgtcccgagcagcgacggggagtgccgatttctccgcgtgagtcccggtctcgtcttttccccctcggtctctcatgaaacaccccgggctgaacccatgtgcatatcggggttggtagtaaagtatgggatacgtatagcggggaagctctccatacatttcaacatgcgcacatcgtacggaccgtggcgctcagtccgcaggtgacaccacagtacctcttgaccgtgcgtcccttcaaccgagactcccctcgcgcactactgctgacactcaccacccgtttgccatctctcagggcggtcatgagaaaaagattcgacttttcgatctcggacggccggatgccgagccgcttgtcctcggtggggattatgctggggagacgtcgtgcaagggtacggtccgctcgctcgtctgggacgaaggtcagggcggggtcgtcgggataagcgcgggcgaggacgggtttgtccgatggtgggacctgaggacgttgaagcagacgagcagtttggacatgggggaaccggtgaatagcatggagatggtacacggtggtgggacgttgagcgtgacgagcggcaagacggtgcactttctcgatatcatggggtgagtctgccagcgccatgtagctctattctggtctcggctcgccgtgatgtctcgattgaccgcccgcacccgatcgtctaggcaacatccacccgtctcgatccctctgcctcatgcggtatcctcggcctcgttacacccggtcaagagggaccggttcgtcgtcggttcgtcggccgatccctgggtccgtgtgtacgacctggatacgggcaaggagcaggaagtgtacaaggggcatcacgggccggtgcattgcgtcagttatagcccagacggcgaggtctatgggagtggatccgaggatggtgagtcggcgatattgaacgatggccccagtcgtacgatccgacaatggctcatcgttgcgcgcgaaacgtcggtaggaacgattcgtctttggcagacgagtccagggacgacgtatggactctggcaatcgccttatggccagcaacaacaggggggtggagacgtcaacgggaacggtaccgtcgccacataccagtgatttgcccaacatccgacgcatccgctctgcttgcggggccgcacactcgtctacttttgagaatcgttgtatatcccgtcatagcatctccatcatcaaacaatggtacactgtcgtttcccgagcccgagcacacgcgtcaagtcgcctgacctccctcgacctccctcgtcgccgcttcctcttcgatggcacctcgacccttgacgaccatcgtctcgtaccacgtctttctcgtctcggcgaccatccgcgtacggtcctcgtgcgagagcgctcggtaccacttggcgaacgtcttggtatcatgaggttttatccgcatgggttggttcgtctttgggtgaacggtcgagatgggttgatggtagatgttgggggcgaacgagatgggagggttcgatttcgaatatcgaggttgttcaggcgtgtccacggatcgagcgacgtagggtttgagctgcaagggccgcgaggttgagggggtgggggggcccctgccatcccgggggtgaacaactgcccaccctgattcaagggaacctgctgcatcccgccctgttgctgctgctgctgctgttgctgagggtactgccctccgccctgtgacaaatcgctatagccgccagatacaccaggagtggagatccctactcctgctccaggtcctgcgccgtaccccactcccactcccattccctgtccgccgatggcgggtacggctccaccttcagcgtacgcctgggccatctgggcggttgggtattgtcgtctcctcgggttactgctagtcgccgcgggtacagcggcggcgggtggtgctgctgctgaagcctgagcggcggcaggggtggaagatgatgccggggcagaggcgggcccggtaggttgttcccattgagatcgattgttgatcgtatcgacaaacaggtatctattggcctgggcgtcccattgagctgcccagccggcagggagagacggttgagacatggtgatcgcaggtgcgtcggatcaaagggaggaagggggtcggaagagtaagaggtggactatctggaacgaggagatgtgggcgaccttgctatcgttcccggaaagagctcgtgcgtggtccccgacgtcggagcgaggtggggtcgatcacgcaaacgggggtataggtcttgatgccttttgacgcgagatggagtctaggtggctcgaaagagtcgtcctttgttcacttgtttttctcgcccgtttattttttcccggtgttttggttgaactcgaaagtgccgagtatggaacttggtctatctgagatgtgtgtgaagtgatgtcgaggtagctgttatacccaagcaagcatggtggtacttgggtccctgacctgacgcgtggccaaggtcaaagtgtccaagtgtcgagagtcaaagtgacacgcgcgcgcgtgagaaagcgaataatgggggaggggagttggacactgcaggctggtcgggtcgacatcaccgatctatcattgcgctatcatcattgaatctcaacttgcatctcctgccgtcgtcccaaatcgcaggctgaacaatctccaccacgacaagccgccgaaacgcttcacacgtccccccgacaccaaaaaacctacatcaaaactacctgccaagatgaagctcgtcaggtgaggaccctctctcgcgaggtcgtcgcaccggaccagggggggacaaccagctgaactgaccaacacgaccaacaggttcttgatgaagctctcgaatgagacggtctcgatagagttgaagaacgggaccacggtacacgggaccatcaccggtgagttcaagtcaggcctcgggggcatgctcggcgggagaggaggtccgccgtcgctgatcatctctcgacactcgatactcgattactcgattctcgattcggatttctgatttggatgatcgaaaccagccgttgacccccagatgaacacccacttgaagacggtcaagatgaccccgaagaacaagtcgaccgtgaccgtggatacgctggccatccgaggtcctaacatcaggtactttgtcttgcccggtgagtcgacacggcgagacacagcgagagaaagagagagagacgggtgtggatggtccgacaagggatgtctgtggctgatcgaacctcgaacgatcgcatcttttccttttttcatcgtcgacatcgacatcgacatcgatatcgatatcgatatcgatcaccaccatcattaccatcaccctgcccctctccttcctttatccccccagattctcttcccctggataacctcctcatcgacgacgctcccaagccaaagggaaagaaccccgggatgggtcgaggcaaggccagtcaggcgttggataggggcagggcgaggggacgaggggagaggttacaatccaggacactcgctaagtagtagacgtctcaccgtttgtactgaacaagcatccgatcctagctacctatagcgacattacttccttatccgtacatcaacccggattcgtatcatcccaaccgaattcgctcccgttagccgaactcggcttccctcctgttgtgactacctacgatccgtaccgacattgccacttagatatccattagacgcgacttagcgaagctccgccgtaacagaaccttggctaagttatttgcacccatggagagcttgtacctaccttatgattaccacctaaagtttgattatggaatgtattacttgcctattacaacaattatacccagataagttacaagcaatctttgaacacctgaagggcatgcactaagatgattttttttgggaatttacagtggctttgggaagtcaagagggacaggacgcagtttagtcaatgggcgagtccgtcagcgttggcaaataccattgggccaactcaagtttgaagttggagagatcctagacaataaattcaaatgccaagtttgcctgatgctagcttatatttggtcagataggttgggtgttgcaatctcttggacaatagttgggaactgtcaagaagtctgacacactgctgagatttactgggcatgggcgcaaataataggcataaaagccaaagtcaaagcattttgaaaaggcaactccaacccaagccccagtattagcaaccaaaacaagatattagttgactgatgattgttcaataactcccaatcacaacttcactttgtccctcaagttagccactgcctctttgaacggggcagtagcatactcccctctgacctaagcgaacctccaagctttgtgtcttgccactcctagaaccagactgtcaccttttcgatcactctccaagccagctttttcgggtcctccttatccctctttatcttctagacagggttcttctgggaacacttcaatccatcttggacgcagagggggcatctcttcgagagacccatagcttcagacagacccgcttgcgagtcttgcatatgtatcattctagctcttgcgccattccttctcagaaaagtcggcttgtcatctcgatcaaaccttggaagccgatcgagcgaatatcgtgacccgatagcctctcaactttgcgatagcttctcttgcctgctacactgacaacaatctcgacttcgagttgcccagtctcgcctttacgtacgacctcgatgtcaatgatggtctcactgtccatgccattctcatgaacatgactgcgttggcatagactggatttcgtgaactggttttgcgagtcatacgtcaatatcgtcagaatgcagctacttagctctgaatgacggacaggttgagatgaatatgtaacacacaaaggggcgtgatgaagaacgctcaaactgtggacgcatttggatctcaggaatgtaatcatgtctgttgacaaatccgaaagaagggaacacaatgctgtttctaatcttgttatctaagcatcgatagtggacgggcaagaacacccgacagaacgtgttacaattctggccaaatatggagactggcctggaagtccagcaacagaccggacgacagtcattccagtcatgtgcataaaagcgcttgttgcaatggtagtgggagcgggatgactggggcaaaaaatgtatagcttgtaaataggctattcctttagcgttctataagtttgttataagaactattcgaaaggcttgcttgtaaatatgccgattcagtctggaggttcataagaccgcccgcagattatggtgccccctctcaacaaagcccgcctccaggcaccggatgccgaatttcgaccgtcagcgattatcatccaaccaacaagcgaccgttctggactctcggttacaccctgggtcagcctctgcaaaatgaacgaccatgactcgtggtgctgtgacattcgtatcttccacatactcatattcgtatcacagcagaatcgcggtgcaactcgaggtcgttcaataagtccgtaccgacctggagtcttgcagcgcgcatcataccagcacaatggcgcgagaccatggatgtatttccaggacgagggtcgaaacaccgttctcacatccagtattcgccgaggcgggctcgatcatattcttgtggtatgtagagcttgttagtataagtccggcgtctcttcgtcatctgaatgcctcagtcccgccaacctcgggtctacaaagccaaagatccgttccagcgcatgactccttcacgataagacggagaaacgatgcgtgtctaaaggcgagtagttccactgtacgtcgagggaccatgtaaagtaggggtatggagcgtgtcattccaccatccttcgtcccacgttctaccattgagctaagcttcgcaatgtgtaaatcgaattaatcgaacagattatgggatgcttgcgatcggctcgattggatacggaatcaagtgacctcaaaacgatcgagccaggtaatctgaggttacaagccacgagaaggcaggtgcatatcggtcagactgcaagcccactcgaagaacacagggttcgcccgaacctgggcatggacctgtccaatacgcagatggagatgagcgtgctagtctatctcctgccctatccggacagcaggtcacgtttgcgtggccgccgaggcacacggaaatccgtaccgcagctaaaaaaaggaggtctgcgatcgggtgcacatcaggtcgaagaaattccagtcacctggctcgaggtacatcccttgacgaatggtgctggacgacgtgatgctcattgaggtatcgtatgggaacatgaacagtaaggggggctcgcctactgatagttcacgcgagcatgtcgacctcgtacgagcacgcgtagatagttgaaagcctgcaacttgtagccagggaagagtgccgttgaacggatactcgatgatggctgagaatatcgttgaaggatggttctgggtggatctgcgcttcgctctcagggctgggacaccctgttccaaggcttctactgttacggtacggtacagttagtatcgccccatcaaatattcctcgtcgtcggtctcaacgctgtggggagcaacgtatgagaagggcgtgcgacacgaatcgtcttgctatcgccagctacggttagtagcatgcgaactccgcagcgaagacggtctctgttaccctggcgtagggtgaattcagagcgaaaatcgaaaagtcgactgataagctggcgatctaccccggggattcccgggcgtcatttctgcgatagaaaaacatcgagtatctggtcatctagcacgatgttcacaagatatctcccgcgtcctgcagctgatttaaatgactttctgctactccctgcgtttcagatcgcttcatgagcaggaccgggacctctaccgagactcggggaaaatgcggacaagtgatccggcgtagtcgaactttgattctggatgaccttttgtttgttctacgcccacgcccatggccgtccacccttgctgctgctgctgctgatcgctggtgggtctccgcttgctccgcgtcgcccccgagccccgtgcttcccccttccccttggaccccccttaggcattcctcacccccagcaagatttcaaagggtacgttcacgttcctccttcatctccatctctgttgcgtgcacagtcgctcaccgtgtttgttttataaacctttttcgacatagacctttgagtgagtgagagatgatttttaccgtgcggggacacgggggggacgtgcatcggttcggtgaggttcgggggttcaatcacgaaagaaatacgggcctgggtccgggtctgggtcatatggatcggtcaagcataaggacatggaacggcaactactcggacggacggagcgggaagctgcaaaggcgatgtggtgtgatatgcgtgcagggcgagatgggcagccgaggaaatcaccctcactcgtcgaccccggtacatggacccgcaaaacgacaaagcgtacatgtcacccagtcgacatgctcgagaaggatgggcgccctgccctactcgacgaggaactcggcaggacgagggagtcttgtccgttacgataccaatcgaaacgtcgagactccctaccgtcaccgtcttgtccttcctctccgcttcgtctgaccctctggaatattcggccatctaccatcgacgatgtgatgacaacggcagcctccatggaacaaggatcaaggatgaaaattcccaacctagtctactctccatactcgacgatccgatccccttgcgatgagaaccatctcttgaccacccgaagatcacgacgatcaccgccgacgagggtcgatgaagacgggatacctctcgatacacccggatgaccatgcctcgattaccggacgacctgggatacgcccccggggtcggagaggacgagatccacggggggtgatctttgccgaggacgatgggggatgatgatcgaacgggatggatggctggtcgtcgatcagagcgagcagtagaggttgatcggcgacgacgacgaccatgccgatggcggtgattctggacgaggggacggcgaccggcatctcgactctccgacccaaacccaaacctagacctagacccgcacctcgagaaccctcgaaacgaaccgaaccgaaccgacccctctctcaaaaaagtcgcacccgatttcaaactgaccgtctgtttcccctttgctcctctccgcagagaatcaacaaaaatggcccaacgagtcaccctccgaaagcgtaccccttacaacaccacctctgcccgaaggagggtcgtcaagacccccggtggaaagttggtcgttcaccacttgaagaagttggccgtgagtctcccctcgacgtggaagagaaacttgggaaactcagcgacctgaccccgcctcggcatgctcgatgatagaacggacccaagtgtggtgactgtggactcggacttcccggtgtccccgctctcaggcctagggagtacgctaccctctccaagaggcagaagaccgtccagcgggcttacggtggatcgaggtgtgctgggtgtgtcaagaacaggtgagtcacggcgcggctgccccccgatctcgcagcaaaaggtcgaacgagacgctgatcccgatcacctggctcctcattctcaggatcacccgagccttcttgatcgaggaggccaacattgtcaagcgtgtgctcaaggcccaggctgttgcccccaagaagaagtaaacgcatcatccacagacccccctcgacgtggacgtgtgctttgcctttttctttctcccctcaccccaacaaccccttatacgaccctcaccgttcaggggttcaggggtccggaaggggatagagggagattggggtgcgacgagatgagatgagatgagatgagatggatgcggtgggataagagggggcgtgcagcgaaagaggactttacaaaaaagcatcagtctctgctcggcagaacagggcggtcattcgagaaaaaagaaaagagaaaagggaaaaaaaagagtttgggctgcgggccggggagcaggattgaattccctctgaggaacggagacccagaggacgggaacacggcctgatatgaaatcgacctagaacccgcctagctgaccctcatttcgacgatgaccttttagcgcgtcgcgctttcgttttgcgggtacgggcaagaatcgaactggtaccgtgccgagcggcttttattgacgacgcctgatcgaggtcgtcgatggcttcaaggtggatggaaggacgagtctgtgcctgtcggttccgagtgggatcaggaggacgatgaggacgacgacggtgatgacggggagtcgactgatcgacaagtgtatcgacgtgggagggaagcgggtgagcggttaaagttgggtttggatgagctgagagaggtcgtcggtagtgtcaccaaggtgtagcctggtggtctcgggaacgagatgtatacaggtagtcagttcggtctagatgagtaaacagagggagggtgttgtgtgtgaccggaccatccgcggtgcaaatcccctcctccctctcttgccccccgcgcttgttctctcgatttccggtgacgtagcataacatggagacctcgttgaccatccacaggaccagccaactcatcatctcatcatcatcatcgttcatcgcgatcatccacccgtgtcgtatacggtctaccatttgataccacaccagaacagctactccctcacaaggttgtacctcctcgcatccgttttcgatccccccgagaggaaacctgctcgaaaagataatcaccaccaccaccagccacttcgcgctcgctcactcgacctcggattccttgcgtgattagagaggtacctaccatcatcatgtccggttacggcggccaatacggcggtaacaataacaacaacagctacatgcaacaacaacggaccggtttccccggtaccggtgggtttagcgggggcatgaactctcagcctactgggatggggatgggcatgggaatgggggggatggggatggggatgaacatgggtagcgtcggaggcatgcaatcccaacctacggggatgatggggatgcaacccacagggatgggcatgctacctcaacgtaccgggttccctatgcaacagcaacaacaaccacagcagcaacaacctcaacagacgggcaggatcggcgttcaaggtcaaggtcaggggaactactctttcctctccgccccgccttcttcctctcagttcaacccttccaacaacctcaccggttctgggctctcttcccaacctaccggcttctcatcgagattgtcctcccagcccaccgggttcaacggggggatgggcatgggcggagggatgcaaccccagcctaccggttaccctggtgggaatgggatgatgggtctacaggctcaaccgacgggtatgccgcatgatccgaggttacagatgatggccgccagcttcatgccttccaacgtcagctcggtgagtccccccctccttgctctccttgcgatcctgtccagctcccagcgttgtacgaccgcccactgacccccgcggtcaacacgagcggacgcgggggagtgaactggaaaaccggattttgggggggggggacactcacctccaagaccctggccaactctccggcggcgacgtcggcgttgacgttcaacaactgaccttcctcgttctcggccaacgaggtcaagatggggagacacccggccctgatggcggcctcgatgggcgccttgtcgaccgaggtgatctttccgacgagcccgtacttggccttgtcgaggtaagtcgcaccgaacactcccgtggggatgggacgggctcgtgttccgagccgttcgagcgctgaagtgagcttgaggttttcttgcaaaaacacgcgctgatcggacaagaggagggaatccccgtggttgaaccggtcagtatcggtcaaggttgaggtcaaggcagagcgatgctcgtccaaactcaccctggcgatctgcaaagtcttagggtctgaccaacgattcactcgaatcagcacctgcaccagcaccttccccgccgacgccccgcacgccgtcccctcgtcacttaccggtgatcctaatcccatcctcataatcagggacgacgccttcctgctcgagaatctcgttcaactggggtcccgctccgtggaggacgacggggtagagtccgagcctgttgagaaaggagagggagagggcgaggtcgtctagctcgttcgagaggatagcaccgccgatcctattaacaggaggggggaggaatttgttcacatgtcagcgtgatcagcgggggtggacttcggcccgcgtggaagggcgcggaggggggacttacttcaagacggcaaacttggcttctggcaagactccgttcgagctcgacgcggatgccgacgaggacgaggacgagctgaagatcctgaggtacctctcgacttcgtgcctggatccgagcgagtagaggagacggacgatggtatcctgtgatggaggtgagagcggcgtcgggggttggaggtggtgggatttcgggttgattgcgagaggggaggacgggtgagggagtgcgaaggtacgagaagaggtgcgtacgccgtggggacagagaggagagggggatgatacagatagaaggagattgtttaggaaggggacgagatgatcagccggtgacatcagggtcaaagggacaacaggtagagcgtgatcgtaaggcgacctaccctatccatccctgcatccctggtagcggcgctggtcaatcccctcttcctcatctctccagcgaccgacttgacgtcgaattcgaacatctgagccgatgatccggtgtttccagcgactccggcggatgatgcggccgaggcatggttcgagttgagggtaggtcgggtcgaggacgaggagagggagacgaggttgcgtcgacccgacgaccggagtgccgaggtggggatgcgtcggagcatgttgggtgggagtgtgcaggtgtgtaatttgatgagattcggtgttgtcaggacgatctcggggagggtcgatgtatgaatgtgttgtttcagggtgacaagatatggtggtggtagtggtggtggtgtggattgactcgacatgagatgagatggatgagttgagagatgagatggttcgtccgaagcgcgcgtgagagggaggagagcgagagagcaagagagggcagggggaggggaggaggggggaggcgggttttgtcgtgatagtgtatatatgtgtagcgagaagctgtccatggcatccccgtacggtcagactgaaaattccccgtcgggacgaccgacgaggaggcaggcagggcgtatgatatcgtcttgatccctgagcttcttgacatgacaagatgattaggccatgtccacgtccgctgtagttcccggggtttgcgatccttcttgctgcggtggtgcacctgcactggtcgccccggcagcagcagcgacgacaggagggggcagagggctatcgagcaagaggtccttcccaccggcttccgattcctgcatcgatcctgacccgcctgccattcccgaaccggcgtcgttatcattcgcacccgtagcgtctgccgaattcgttccccaagggttggtcttgagctcgctatcccaagggttgttgaacctcgtcaccctgggcttttctaccaagacgttcctgatcaacccggtaaagtctacaacggcggggggttctagtcgacgggcctcgtcttcgtattcagtgttgacgtagtacccgacccggacgaattccttgtcccggtaagacgccgtgaggatcagcacggtcacgccgaggatctcttcagacgaggtggacgggagtagagaagggttgggcggtgcgcatgtaaagtcgaacgagttgactccgatgggcacggggccgactgtacccgcagggggagcatctagatcagcctgtgacagggagggggagaggaccggcggtccgtgcggctggactcacccatgcagctgtctagttcttgatcgtactcttccgacttggcatctcctacgtagagcaacttccattcgatgtctatcggcggggcgggttgtggcgtagcagatcgacgttgaagaggggagatggaagcgatagcaagattcgtccacaccagttgagagtccgcgggttcacgaaaagagcaggatggccgaccgagcacaagatatctctccgtcaacatcaacagccgactctaaaccatgattggccacacagggctgacgagctcaccttcctccagaccctcgacacactcaaaggtgatcctaaactgatactcgtcatcaaacctcgccgggttgtttaaaagctggatgttcctgatattgacgatagactggagtgtcggatgaggtaggcgagaccgagcaaacacgaatcgagagagtgtgagatcacagtgttagcgggctgacgaggacgaggcgaaggacatgacgacgaggggtactgaccatgtctgatgatggacttgcgagttgcttcgtctaggtgtaggaggagtagctctagagatgatggacgtagatgaaggtgatggcgggacgatcttttggtagagcggacttgagagttgagaacggtgacgaggtgaagctgttgggctggactggatgtaggggggaatggaatgaacaagagggatgagaagaacgaggtcgaggtcgaggtcgaggtcgagtgcaacgcgtccttgtcactttgtcggtggtctttggtcaaagctggcgcgtaaagacgcgttcaatcaagagagaagaggagggatggagatttgcatccgcggggcagctgggggcaacacacaaggggggtaggtaggtgggaggacgaggcgggcgtggtaaatacctacgaacacgagagttgtcattaattccatcacggctgcaacgatttcgagaatgcggatgaaaagtctaggattgatcgaggccggacgtacctccttgataatcgctaccctctgcaccacgcatggtgatgtgccaatcgaaaaggtcgtcctccaacggggcggcgacgaaatcctcgggcagatctctttcgaattctttgtgttcctggaggatcctcttgatcgccgtggaacggaggttggctttaggtggcatggcaagatcgtagctagggcgagtcgtcgggtggtgatggtcgtcgccgtggcaaaccacggggttgtggtggtggtgtgaagatgctgatgctgatgatgatgtggaacgtcccgcagagtcgaacgtcgttcttcgctcgatacgaggtgctatcgatcccagttgtgtatgtcgaggtgggtggttgtacacgagtacgatctggtgccctttgtatatatacagactaaagtagtggtagatatgccgtcgaacatgatatactcgacctgtcccccggtctatgaaagggcgatcgacctcgtctccacatcctgcgggggggggggggaactgattcgggaaagagtcgggtctcggaagtaaataaatacatccggggataggcaggcgcaggagcaggaaagaaaaatacttccgtgacatccttatttacttccgtcaattagcttccgatgacttccccccttcctcctcctccgccagctctcctcgttcgtcgtccacctcatcaaaaccggtttctcaattcaaacaagcgaacacacacacatattggacagtaccttactagctactcgacacctcgacgtcaatcaagcatgactgaaccaagatccaaccccaaagaacccgacgtactcttctacgatgctccttgtaagccccatgccctgctcgttctcgcgccatcccgtcgtcagcttacccccggccgggtctgccccttcgcagttcaactgtacggactaggattctccaactctcccctccatccagccagggccgccgtgacctcgttcatccctacctcgagctcgaacaagatccagattatcgatcgtgatccccggtccactggacacggcgaccatgacgacgagggcgacctagtcgaggacgagcggtacagtcgagaaaggtctaggacgacgacggacggtcgaccggattacaaactcgtcgcacaggcttctcacccgttcccgcctactcgggtcacatgggaaccacgcccttcttcatcttccacctcttccccctcgtcttcgtccaggttgaccaacaggggcacaggggaacgggagactgaattgttggccacgaccggggacgcgttgagggtatgggaggtggaaacctcgatggatggatggccggacgaggtgggagaaggtgggagtgaggatgatgaggatggtgacaggtttgggtataggcgggataggagcagggtaggacgggtgggcagtcggggtgaaaaggtcaggttgagggagaggagcaagttgaccaacgtgagtcccgccccagtggacacccgatcgtcacccgcaaaggtgggggggtgggggtggatcggatgtaaattgcgacgcgatgacgagagaatgtcatcattcttagtcactgacttggctgaatacctttttaaggagatgatctcgataactttctcacgccaaccatctcaaagtaagcaagtacagagtagcatcgggttacaacttcgattcatacatgctatggcttagcgttcaacctgcaaccagatgtacatcacaaaatcgtatcattacactcaaaacctcttcgtacatagatcaaattcattcacattcgactcaagatgtccgccttgtttcgctcgatgacggccatccggtcgtcctttctccccggaccatcctccacccagtctctccgagcagatctcgcacaattcccaagtctcagtcagtcccggatgtcgcagtccgaatctcgctcgtcgtgttggacacattttgacatactccgcctcattgcatctcactatagactctcagcaagtgaggacagccacgaaacgaggaggaggttcatccaagaacggacgatcttccgccggtcgtcgactaggagtcaaaaagtttaccggtgagcctctcctgcgcacctatcactcgaaagcccgaacgcttcatttaaccgacaggagctgacggacatccctcgacccggcgtttatggcgcgatagatcaatacgttttaccgggacagattattgtgcggcaacgaggtacccagttccatgccgggcagaacgtgagtcttcgcgggataaacagtgatcgctccaccgaatgtagacctgtcgcttacactccaattgacctgcctcgtatcccaacctctgctgcatatacctatcatcgcctgacctcccactcaaccaaccccgctgcacatgtcatccacatcccgcgtcaacccccgcaggtcggactgggcaaggatcataccctctacgccctccaaccgggttacatcaaattctactcgtccacccttccctttccccacccaacgacctcgcccgactcgcccgcctcgtcaccttcctcgcaatccccagcgggggtcatgcaatccgtggtcaaacgccctagggagaagaagcagtacatcggggtcgtcgctgagcgggaagaagggttaccgagggcgctcgaggcggaaggacgggggaggagattttggggcgcagagcgggtgcattgaatgtgaggaggtgggccggccgggctggtgtggagggtccgtgagtgtaacaatataccaacattagcatgtgcatcattgcatggagtgaccatgctggagcgctggacgagtcttgtcaatcggacagactgccgaagaccgccagcagtaccaattacctacgggacctggactttggtagaattcgacatcctggcagggaagcaactgacgagcgcatctatccgactgtgcaatgatggagcgatggtgtaacgtcgaaacctgtcgacagaacttccatcggttcttttgccgccgctggatgtgacaaggttccgaccctgtctctgatacacatctccgagcccacgagactagcgcttatctcgtatgccgtcttctgcttgaaaaaaaaaaacgcacttcattaaataatgttggcataaagtaattgagtgaggcgtgggggggcggggggcgttcccctgctcctccttcccctgcccttgcgccctgccgttgccgggagatttgccgagagaaaagagtggttcgacactttcaatccgcgaacgagcgagtcgaccaacttgagattcatcgaaccacccagtccctctcacaacaccaccaccaccaccacctgcaccagcgactcccaccagccctggcttttttcttctcgtcgtcttggaggctttgacgggacaacactctcttttcgccctttcacttcagagctccagattcccaggacagcctgtcactcgtcgtcgccgtcgacatacaaacacatcgcaccacaaaaacgcacaacagaaacttccgtcgtatcggtccttgacacctatcgacccacaccaccggatcaccactttcgttttcttcgattcatcccgaaagattcgctcgctctcggcgacccccttcatccatccatcggcttcgccaagtccttatttatccggacgccctcgccgatcaacgtcgtaccacctcgttcgccgtcactcgacaatcgatatatagcatacaaggtcgacacaccgcaccggtaccacttttgcacgccacgcccctcaagtcgcggtataatacacctctctttaccataaacacggacactgctcctctttgccgaccatggatgtcattctcaactttctcgacgaccattacctggattccgcctataccaaactcttcccctcggccacttttgccccctcggcgcaattgctgatctcacctaccatcaaggactcggcatgtaccctcgcccgatcgttggccaacatcggggtggacccctcgtcgacatcgtcgctgtcctcggcagcatcgctcttccctagggatagcatcatccgtcaattcctctccctcttcctcctcgcctggtcctcctctctcgtcctgtacctcgcagtttccgccctgtcgtactactacctcttcgatcgtcggctggaacaccacccccggttcctgaagaatcagatcaagatggagatcgacatgtctctccgctctcaacccatcatcgccctgatgatcgccccgtggttcaccgccgaagtcagggggaacacgttgatgtacgacagttttgccgattacggttcgacctggtttcaaggtacctgggctgaggggaccgggccctgggtctacgccgcggggagcatgacggcgttcttgttctttacggatttctgcatctattggatccaccgatggttgcatatccccgcgatttacaaacggttgcacaagcctcatcataaatgggtcggtgagtaccatcagagtcgggtccggggcggatgctgctcggctatatcgttttgctgattcggctccggttcgttgcacaatctcttcatgcctttgctatgccagtccctacgccgttcgcctcgctcgctttccaccctctggatggatactcgcaatcggtgccttaccacttggtcgtctttatcctccccatccacaaatgggtctacctcggtttgttcgtcatcatcaacctgtggaccatcgtcgtgagtaccccccctccccccccccccgaggtctcctcggatccatcacccccaccgccgccgtctccccatcccatcttgatccacacccgctccttcctctcccttgacctccccctcgacaccctctccgtcttctccgtcgccaccacacccacaatcatacgtcccctcgagcgcattgcaatcaaactcttccttgcccaatcgcgcattgacgaggttgtgcatcgagcacaaccataccgaggccgcctttctcgaactcgtctggcgggacaacgaatccacgggatcagccctctcctcctctcacccccttacgcgctcgctcccttggctcgctggctcacctgtggtgggtactctttcaagagcccctgaaattcttgtgcgcattctccgcatgggtagagccgcgcaaagaggtgcatgtagctcttgagggccgctcgttcgtccagggtggggtgctgtcggggtagggtagggtagggtaggtcgtgcacacacagagagagagagagagagagagagaagggaagcgtagagtatcatccattttttatccgatccaatgtgccgatacgcgatcaggagaagaggaagtcgagtgagggaaacgaaacgaggaaacatcagccaacccgctccatgctcggcgtaacaggcgtccgcctcatcacccgtcgtactccgggcgactcgagactcacctcggggaacctcagggtcatggtatgcaacaccttccatgccgcccgacccagttcagccctgacaaccacgacgacgaccaagacgatgatggcggcaaacgacgatgatggtgatgatggatggatggcgagaatcagccgacgagctccccctccgtgatcatgtaccgacggggtcgactttgggcttacttggcagtagcgttccctaggcgggacatgatcactgctccggtttccacctcgttgataccgggttgaacatcagctttgagttggtcgtgggtaatcttgtcgtcgtcgtcgtcgtcatcgtcgtgatgggtatgaggaggggtaggtcgaggtcgaggtcgtaaaggtggcaaggtcgtcgtcactgttgattcctcccctcgtacggccgtcccgagcgccacccggagctcgtcttccccaccagacccggatccagacccagacccagacccagacccagcgctgcccgccctcgtcctcgccgttgtccgtgggtaatcgggttccgcgcctcccttgtcccaatgatcttccctagcgaggatatcctcctctatcgaccccgaatgaccgtctttctccgaggcgagggtcgacacggtggatgtccgggtgatgaagggatgtgtgtgtagagggtagaggatgtacagggtggagaggatgatgagggtggagatgatgaggaatgtacgtaggaatcgtgggatcatcgtcggtcgtcgtcgtcgttttctgctgtcgccggatggtgctccggaggatcgtttcgtcagggatcagaagtggagagggaggtcgtggtttggtcgttggtcgttgcgagagtcgagaggatggtggtccccccccccccccccctttttggaaccgttgggcaggggcaggaagaggagaagcaaggggggaacgagcaaatgcgaggcgaggctaggcagcttgggcaggaaggaaggagagagagagagagctgctatccttctccctctcactctcagatagcaagcaaatggatagataattgtcacaacctatatcctcctacaaacgtctagtcatcttgcactctcgctgtatcattcaaatctcgaaccatctcaacgacagtgaccacaatctagtacaatctcgaagatttacactactactggcgacaccaggacctacctcacaccactaccacacgtcacacccgcgcatcatgcctcctcaacctcccgctcctcccgtcttttactcgtttgacgacaacagcaaactcgtcgactcgctcgccaatttcgtcgtcaaggctcaaaacgatgccattgacaagcgaggcaaattcaccttggctctcagtggtggaagtctgcccaacaacctgaaagggttggtaggacaacagggcgtgcattgggaaaagtggtacgtcgggtcgggtcgtcggggtgcaagtgtaccgaggcaacgcagcgagctgatacgttggtctcatccccgacttggccggactcgctcgtctatagggaggtctttttctgcgacgaacgtgtcgtccctctcgaccacgaagactcgaactttcgagcgtgcaacgaagcctttttgaagcacgtccctatcccccgcgaacagatccacacgatcgatgaatccctactggatgacctggatgaattgtcggatcaatacgagaagcaactcatcgccctctttgctgaaaagaacgccgcccgattccccgtgttcgacctgatcctgctcggaatgggaccggacggacacacttgttccctcttccccggacacgaactcttgagcgagacggaccgatgggtcgcctggttggacgactcgccaaagccgccaaacaagaggatcacctttacctacccggtcatcaaccacgcttatcgatgtgcgtttgtcatcagcggagagagcaagcaggacatgttgcacgccatcttggacgaacccgagcacggtctgccgtgctccagggtcaggccggctgctcccggtttggtcttttggttcgccgactcgtctgccgccaaaaaggtcagttcgtgcggggtgtgacgaccagcgggaaggaaagctgacgtgacgatcggctcggaaccgtctcgtcctctttgtttctgttttcccacagaccatctaccctaccaccgagttcaagtggatcggatcgtcagccgaagcacacgaggccgccaagatggcccacgaggcgaaaaagtcggccatctagacggggggcgcatggcatgcgagctttctatcctccgccgatgctttccctcgtcctttccaagagcttttgaatatcgactagacgtgtagaggtgcatcgtaccgtacccctgcagcaaggattcctctccccacccctcgccccgccccgttctcgatcgtaggtgtcgtatatcgaggtagtcgttcgaatatgctattgtttacgttgtcgatatttgtatccgcacgtgtgtggttgcgcgcgcgctgaatccgcggatgagggtctactccgtaacacagactgaacatcatagaggaaatggcactggcaagtgtgcatgctgcagatgttcaggaggaccctcagtcatacagggcagccatgcaagatccaaggtctgacttgtggcaagaagccatcaacaaggaactcaagtcagtcaaagatactggaacttggcaagaagtcaagtttccagagggagctagcttggtagactccaagtgggtcttcaagacaaagctcaatgaaagagaagaggtggtcaaatacaaagcaaggattgttgccagaggcttcactcaggagtatggcatcaactactttgacacttacagccctgtagcaaggcttacctcactcaggatactgctcaccattgtggcagctcaggacttggagctttaccagatggatgcagacactgctttccttaatggcacaccggaagaagacatctacatggactttccagatggataccaaagacaggacaagaggtcaacaggactcaagcttgtcagatcactttatggtctcaagcaatcacccagggtatggtggcaactcatcagctcatacctggaagagttgggtttcactaggctatcggcagactggggactctactatcacaagaagaagcaggcatatctactattctatgtggatgatgtcctgattgctgctcaaaacatgcgcatcatcaatggcatcaaggatgcattaaaggacaagtggaagtggtcagatatagggagagctacctatattcttggactcaagctggaaagacatagacccagcaggaccaattcactcagccaagaaggctatatccagagagtgctagataggtttggcatgcaagatgccaagaccgcaaccacacctctctatgatgctattatgagaaggcaggacaacaccatcaaggaagacacagcagatagtgggatccttgatgtggagtgccatgtcagcaagaccagacatagtttttgctgttggctatctcagcaggttcagcagcaacccatctgaacaacacctcaaggcagccaagaggactttggcatacttgaaaggtaccaaagccatatggttcaataggatgctacaggagttaggcttcatcaacaaggacaagccaactcagctttactgtgacaaccaaggagctctggcattggcaagcaatccagctcatcacaagaggtcaaagcatattgatatcagatatcactacatcagagagatggtggacaatggacatatcaccattcaccatgttgaaacacaagatcaggcagcagacatgcttaccaagccattgaaggacatcaaacacaagcacaactgtcaactcatccatctagagtgatggagtgagcagggatcaggaagcaaacacacacacacacacacacacacacacacacacacacacacacacacacacacacacacagggcggggcaggcggcggagagagaggggatttgattccgatcgaccttgcacgcgcacggggctatgcatcatcagtcgcatgtatagttgcagttacatcatcggtttcatcatatcatcactaccatatcgtcgttatcatcatcaccgccaacctaccaccatcctctcacggccatacaagtcacgccaacattccgtacgttcaatccacccatcgctatcagattcgagaatccctctcactcgatccccctgtccatccccaatctcgaccgccaccctcggtagacccgcttcgtcccacccgtccgcgtcgtcgtcgtcgtccccagcctcgacgctcaccagacggctcacgtttccagccaacgcgcggtaatgcctcagaccatcccccgattccctctcccctagaacctgaccatgttccccatcccctaacaacgcatccacgtcttcccaccccttgaccgagctggacagttcgacgtactcggccagagggatgtacggcgggttggcgactatcatcctcggtccccgcccgcccaggattgtcgatccctcggtccgaacgagtcggagcaggccgtccaggtccaacgcatctccccggacgaaacgcgcgtatcgatctagtcccaaagactccccgttgatgcgcgccaggtccacggctagcgggttcagatccaccccgagcaccccaatgtgcgcgttcgactttgactttgagttcgatttcgagtcctgcgcccggccatgggcggattgccaaccctgtagctcatgggcgagtaataaccctatcactccagatccagtataaagatccaggatccctatcctatccgtcttcgtcctcgtcgtcgtcttcgccgcctctttcttcccggttgaaccgacccgtccgagtccatcccgcaagacgcgtgcgagacggagaaaaacgtctgccgtctctggacgtgggatcaggacgggcggtcggcactggatcgtcaggggtccgaaaggtgtcgaccctgtctcaacccgcggggaaccgtcaatgtgcgcggacaagggcgtgggccgatcccggggactcaccgagaatgtactgtaatggctctccatctcccctccttctcacccgctcgcccacttgatcctcccacccctcttttcctgcctttcccggccccccgagtatagtctcccgttcgatccactctagctcctgcccagcttcgagctcgtccttcaactctgggttccgctggaggatacggacgagatctcgtctggtcctcgtcgcgcgcttcgacgacgttagggggatacccgccttgctatgaatgtgacgagcctgggtcggtctggtagcaaggatcaaatcatcgcgcgatccagattcagtggcgtggacagggcgcaagcgcagatagggggggcccccccccggtcgcgtacgcgtcgccttggtgtttgtgttacgatcttgggtgtttcgggatcacatccgaacatcgatctccatcagcatcatcaaatattattgaaatacagcgctacagctcagctcccaacgttgtaataaccagtttaccgctcacaattacacacgacctcgacgctctgattcagtagaaagcaaaagacttcggtgtgcggtcatacaggatcagccttcttgatttctcgcacaactggcgcaagggctacgcagaaactcgcatcaagcaagcacacaaagaacgaggaaaagatgatgtccgccaacatcgctccccatcccacacgccgctgagaccccgagccgatcttgacgaccagaaacacatcacaacgatggtcccaccaccacctatcccttcgctcccgttgaacgcgcatcccaccccaatctcgggatcgacagccgggtccgggtccgggtctagtaccgccctcaggggggtcatcgcccattcacaggccatctaccggcgagatcttcgggcgctgttcgagcacgccaaagatcggttcggggatgtcaagtgggggacgaacgtcgctttcctccagagcgatgacgggaatgagggtccaacgggtcgcggtggagaggatggagggatggaggggggtaggcagggaacggggttcgaggtggtagacttcgctgttgggggcttgagctcggaagcgggaatacaacaggggagtctaaaggaattggaagacgacgcggtctgggcccataaaggtcggtagaaaacggtcttttatcaggtagtgatcgtacgaggcagactgagctgatcgtgtcttggacgccgttcacaccgttggtagctatgatctatgccagagcttctagtaagtcctccttgtaggcttgtaaccgtatcacagccctcccatgctgacatctgccgttgaaccccgccgtagaatcgttcaaatccaggttcttcccctcaaattcgtccgcctcttcgggacccccgcagacccctacatccagagctccaagcacgaccccatccacctctggaaaattcctccacccaaacacccttccttcgaactcagggccttcgaacggacgaccggggaatccaccgcgatacacccggtccgcctcggtcctctccaaccgcccgagagacgcgcacggagtgacggtcctcgatgatctagggatgaaggagatgctgtccctaggcttggaagggatgtatgacccggacgtctttccccgaacggggatgcgggaaatcatcggtgatgggtcgggggaagacgtaacgaaaacggacgggaatgaagatgaggaggggggtatggagtggttgttgatgcaaggcggcgaggcagggcgggaggaagagacgggggtcggcctaggattaggagccccaatttgggtcatggtcgacctgtctatgcggatccgcaattgatggccacgtaccgagaatgaagcaggtgctaggcgccaacaggctcataacggctgaggagcgaggcgggggtggaacgtgcgccggggacctcgtcatctgtcgaagcctcgaggctgaagacccatcgatccaaaaagatttttgacgaatcttccgaagatcgactccccgagtcccgaggacggcagggatgggctgacgaacagacaggtgaacggggatgattggaacatgttttggttactgcgatgcgtgggatggggggatggtacggaggctttgtttggtatatcatttgttccgagccgacccgaaccccggccggtccgcccgagacagagacatatacacgcaccgtctctctccctggcttctcacagctagtagtagctcgttctcactacttatgcattcgagcgggggatgcatcgaaagtcgagcttgggaagatgtcgccccggagcggaagggtctcggttctcggttctcgggggcgggatgaaacctccgaaaacccgagccggaatctcgtcctcgtcgtcgtctctgttgaacccgccatcctcctcgatccccgttttgcactctgaacatgagctggatgagtcgagatgagagagagatgaaagatgactctcggtagcttctttgacccccccccctctcccgtgtttccgcctgtcaaacgtttagcgccgaacaggatgatttggatccgagagacaaccacgagtggatctccctgtcctgccccctcttgtgcgactgggggggggggcagcttttgatctcgggccctagtcatcgtcggcttgttctgcctcgtctcttccctccttgtctccccttgccctgcctgccctgcccttcccccttcttcccgccacgctgtgaatcgaattgtgatcgcggctggctgcttgcttgcttgtttccggaaagaaagtgggaaagagacatagaccagggagcaacgtagaatagaatagctatcaggtcgtcacttcctcgaaacatcgtcctcatcctcatcctcgccggttccatatacaaccacctgtcatcactccacatcgttcgcacagagccaatttcgctacctcgttcaaatcaaccacggattaagcgaaatcaagtttcctgcacctcgactttgcgaccagctcttttgaccaaacgtgcgacctctttcacgctccaactcttgaccaccaccacccaccacccaccacccacctctctttcccccttctgaagactctcgcaaacatggtcgacaatgacaagcaatcctcgatccccctgcaatccatgcaaaagccggaagatctggacgatttcagcccgaacgatacgctcgagatcaagtgagtgaccgacggaaggaaaccgtatccagaattgacggcgtggctcgagttcccaaatcttattctcggtctcgtgttgccaccgttggcccctgaccccttggcccctggcctgatgatgatcgcgggcccaggccatcggctcgcttccgtgaagaagaaaaagatggatccggcatcgacgccacaggaatcgcttccaaatgtgaccgcacctggcgagtggcttgcggctagggcgggcgttgggcggatgcggcgatcttgttcagccccgggcccccctgatcttaatctggggaaagagtgatgaaccggcggtggtcaaaggtcgactgcaacaccggcgtagaccgaccacgacagttgcactctcacgaacaatcttgttcatttcgagcctagacatttcgccaagtcatcatggtcgcctctgcactggaagacatgttgcccctcatgcgaaaacctccaactcgccaaacgatcaagctcttgtggatcctcggtgcggtcctcgccgtgagcttcgtcggtcgtatttggcatggtcgggcggatcaagctagggtcatggcggcgaccgaatccatgaggttgagcactgctagtctccggcatcagcataggaacatgagcgagcatatcattggatcctatcatgctgccgtacgggatcgagcagggttagacgaggaccactttacgttcgtttgatcggtcggttcggtcatctggtgaagctcgagctgatacgttcgacctcgatccagcgtgatgatgccgtcgttcggcaggccatgggttttacaagacaacctcgagagaattgctatgggagctgttccgtcgatcaaggagatcatcgtcgtctgggggtcctccgaggtgcagggctcacctcccgccgacctggtacagtgattatccagtttcgaccgcccagccgcctgataccttgtacactgatcctgaacattctcaatcccaccactcgtagtcgccgctggctcgtccccgtcaagtttctctcctcgcccggtcgagacctcaacacccgtttcctcgtcgactcgcacatcaagacccgatgcatcctttcggcagacgatgacattgacatttcgcccgaggcgctcgagtttggcttccaggcctggccacccaacgctctacattctcaaagctctcccggggcaagaacccggggatcccgttttgcctgacatattccgccgtggacgacgtcgaggggatgatcggtgtcggcgtcggcgtcgactttggtttcgaggtcgaggtggaagcgccattcgaggaagaagaagaagacgaagaagatatggagggggcgtcctccgagttcaaacccgcgttggacgttgaagccgatgccgaagccgaagccacggtcgacccggatgacgtttctgcggaaaagtgtctcgctctcgttcggacgagaggaccggtggaccgtcggagggtggtacgtaaaagcatggacgatgtggattgcatggtcgacaacgtttgctatgatagtgatgatggggggtttggatgggtcgtcgatcgaggacgtcgggtttgatgttgaaatgatctgtgatctgtcgatcatcgaatggttcagaggttgaaccacgagtctatcttattttttgataacacaaaatagccatccgccttcgattcttgaataatgacgtgtcgatcatctcgccaggctctttggaaaaagtcgataaaataaatcgacaccctccgttcttcggaagcagaagacggtcttaggggttaggggttattgggtcagaagttgtacagtaatcgttcaccgtgggcctttctacgacgtgatcgtgctcgactgcgtattacctgatttcgttgctcacgggcatcatcccggtgtatgatatctgatagatctgttacgatactcatagacccttgcaatcaacaattcgagtcatctcgaaaatatccgtattaaaggagcatgactttggctgggttgacgagggggtctcgagaacgatcatatatgactctgtagaatcacactagaatcagagggacacgcccacggtgttcagggtagtacgatggaccgggtgggatgggacgacgcgatgcgcgatgaaacgctcaaactctcaacgaaacgagttttcaagatcgagtcggagggcgggagagatttctgtgaccgccgcccctcccgcgcgcgtcggtgatatccccgatgaccacaaggggagacgacgaagcgagcaagggagagacctccactttctgggtacctccaccttttttagtggtgggaagtttgcgcttacatctcgcgggaggtctgatgcgcttttggaatgttcgaatatttgtgcgcgctctctctctctttcgtgaccgaggcctcgagagcgtcgccccccccgtgtgtgtggtctgtctgtctgtgtaggtgtggccatgggggtgtgagtgactctcagagtctggcctggcctagcctagcccaacccaaccctccaccccctacccgggggggagagatcagtcatggttcgtatcggcgtgtcctacgccgggccatcgaatcgcaggcaaggcgtggacgacctaccttggcgatctcgctcaaaccagtcttgtattccgtctcttccgactctcccaaagccttggcgacgaccttgtttttcccatagatgatcctcccggtgcccttccagaggttcctgacctcttgcaagccgtccgtacgcatatccccgacgctgaagatccagacgtatttgtactcgtccaggcatgctcggatgtcttctacgagtttcttcttgtgttccatccccttcttttgggtttgggtgagggacactgtcgaggagcacgaggccgatcagcgggatgcgcgagtcgattcgcagcttttcgcgggggttagggggtgcatgttactcaccgaccttggagcgtttcgagcggggcattttgaatagtagtgagtgtgagagtgttgcttagaggggtgtatctggttctgtgtagatgcggtgtgtgtgtgtgtgtgtgtgtgtgtgtgtgtgtgtgtgtgtatgtatgtgtatggtatgatttcgtttgcagctgttgaatggcgtccgtctttgacctagctagactagagactagggtctagggtctatcaacattttggtgattagtgatcacgtgacttgatcaactcgcgctcacgttacctagttctcgctttgagctgagactttgagtaccattcaacaattaattatcatccaacaacgtcgtctacaagcaagttagatctaaatctcgattcaggtctaccaaccacctattactatcagcaatcgctcctcacaccccaacccatacctacaaacaccctcactcctcctccaaccatgggttacaaggcaaagaacaagcaggctcctcctaaaccactacacgaccccgaggccgtccgcctcgactctcgtcgtcagaacaagcgcaaagccgagcaagaggccgtccgagcggcaggtgggaaaaagaccaagaccaaggctatcgaggggaaaggaggaagaggtagcaagaccgcggttcaggtcgctagaccagtgtgagtagcacggtagtggtcctaatccaacgcgggttttgtgacgatgatcaaggcgcggcaagctgatcctgcgattctctggacccccccggtggatgtcgatcggatcggatcgaataggtactcggattccgaggatgaacaaccctcgggtcgaaaaacgcaacaacaacccaagaagaaaaagtctctgaacaaatcgagcaagaaatcgcaagtcccccccccccccccccccccccccccccccccccccccgccccccccccccgccccaccgccgcccatcacgaccacctccgagactcacgctcctccccctggcatgttcctcgaaatccttctcctccaactgcgtcccctgcccgaacccaccgaaatccggtgtagaatccccactcctcccgcccatccccatccccggagccggagtgcccggctcgctatgctccggactcgtgtcctcgggtgtcccaggcaagggggacaagttgcccggggtggacgctcctgtcccgccgacgccgcgttgtgtctggaggacgtggcctgtagctgtagtcaaggagagtcgacgaccggtgccttgcgggtcttgtacgtattgcaccgattcgagagggataggtgggtgtgcagagagcatgatgggcggcgaggtgtgtcaaagaggtccgagaggtggaagtgtgtgatacggtggacaaagctaggatgggcctaggggtggtgttgagatgattatattccagggctaagtggaccctggatcgggagcgagtctctctctgtctggcagggaggaacgcgtgaccctgtcgaatcgtagtggtataggctcggtgtgtggactcggaaactccgcttcaagcaaggtcgaagagcgcttatgaagacgagagacgagtcgtcacgacgagtcttgttgcagcgtttgtatgacgaggtcggtcctcggaaacgcgacctatgattgtcaagtgtttcgccgaatcgttcggttatgcgtctgtctccttcggttcgaaagacgaccgaaaccggggaagggagtggtgggaaagtacgaccggttctcgagatgttgatcacgatgacgacgaggatattagagacgtagacgagctcagcttgacgattagtgggggttgctatgctggagggtcgaggtgataaatcctcgtcgagccgtgtggtcactccttcgtgccgagctgggtgtggtgtcgctgactaaagaacctggagtttgcgtggtctgcgcctggaatactcgacgacggggtggtcacgcagggttcacactctgctgacagaggggagtagtagtgatgatgtcaagaaaccgacgaccggggatgatctctgaatcgcctgacctacctggctcgtatgtcccctatacccaaacacgaatgagatgaataggaggtccgattggctgtcaacgacccgcgcactggcactggcactggccgatggatgacgatcgtctggttggctcggctcaggctccggctcaggctcagactcagactcgaaccagcgcacgtcgctccttgctccccctgtgctggctggccaccttcaagctgccgcccctcggcggcagcttgaaggtggccagccagcacagggggcaatgggggcgacgatgggagcgacgatgggggcggcctgttcggaagcgacgaaggcggtggtggcggcctcccgaggaacttgtcgctctcctgcgtcgacggtgaccgcttgctccgggactggggcgacgaccgggcccctggggtcgaggctgagagactggagcccaagcgtcaagctctcgatggtgtcgtccttgtcgtcggtgccgtcttcgtcttcggtgtcggcaggaacttggaaacagttcctgcgcttcttcgaaacggtcacggtgaccgggtcttcctcgcttgcgggcgctcggaagcactccctccgcctggacgaaagaaaagacgggtaagacaaagcgcattgtcatcgagcaatctctctccgcactaacctggtgctagacacgttgtctcgagcaaactccagggcgaccgtcgaaagctccgtagcgatctgcttgaggacttcccgcgcaacgctagtagtagagcatcaatgacaatgagtattcaatactgtgatggcacgcagacaatgaccaacgagattatgacttacttcttgatggccgtgtgcccgggttccgcttccttgcgctcgaacagcctggaagtctcctgggaccgactgacagcgtagcaagccaaccagcattggttagtatacattacagtatctatgatggtattagaagcttacggtccggcacaagaggggctcgaaggggcaagagatgatccggaagagacaagacgtgcttgcctttcacatgatgatcatttgaggtattagctttgcgactgcgattggagctgcggttatggacccacctctgggccgtaacggcacaagcgatcttagcagcgaccgcagaaacaatcctctcgtcgtcaaggagtacatcgggcaggaccgagatggcatcagcgacgtcctctcgatcgaacgtctcttcgtccgaggtctttcctttccacgcaaaacaccagccggcatcgaatacaaagaacaaaaccaagaagatctgggctccaaggaggagttgcatggaagtggacattgtgtgcgagtgttttgtgtgtgtgcgagtgtggaatgggatgtgtgtatgtgcgagtgtggaatgggatgtgtgtgtgtgcgagtgtggaatggggaagggatgggattggattggtgagtagaaagtagaaagaggcgacgatgagagggaaggggatcgatcagaaatggccaggtatatatgctttttggggaggcgacttgctggcagggggctgtctgttatacacatctgacgctgccgacgaattagacgtcacatcacgccccactcacctcgcccaaccaacccctgacgtcgtcccaaccgaccctgacgatataagtccccttcaatgtctttttcgcatcatgcccagcatcggcacccggagctcctccagcgacggccacccgatgttcctcgagcccgtcagcctcgatctctccctctgcgctaccggagagcaacaactcgccgaacccgtacgacaagtgtcccagcggttcaccagcctcggtaaagtattgattacgctcggtggccttgttatgacgtgcgatacgttgagagggagggaggtggacgtgggatgtcgagcgtgagagcgctggggtaggggtttgggaaggaacgggggaaggaacgtcttccggggaggaagaggaagcttcttcggtattgttcccccggacgagaccttcccaaccttcacgaataatgtaggcttgacatccccgggcgatacccatacggacgaccgctcggactagagtacgaagaaagatggccgggatgaaacgtgagcggagcgttcgtcatacagagcgtgcctccatccccttccggggctcaggactgaactgacctgcagcgttcataccagccgaatcacctccactggtgagcacggcgatcttcttctgcctgggtttctttcccgacgaacgggccttggacccggatttggcagtgggggccagggcgttggagagcttgtcctccatatcgtccttatcctcttgctcgtcagcgtctgcgtcgggttgagtttgggcctggacgggctcgccgggacttgtaggtcgggtggccgacggggtcagagcttcgagctgctgagcctggacgtgaccggggttgttggcaatgtccgtcttggagtgatcgacggtggattgagagacttgagccatgatccctgcgcgcgaagaaaagtagtgtcgataggtgaaagtggttacgaggtgctcggcgggtcacgggtcagttgactggtctgagtctcgaggtctagccgtgattgattataagagtgaacgaatgtcgattttcgacttttgatttttagtgcagtgtgagatagtctgtttgacgacgacgacgacgacgacgacgacgacgacgacgaatgttcgaggtcacgtttaggtcgatgggatggttataaaatccaagttgtcggttggttggttggttggttggttcgtcgattgagcgggcaaagagcagcgggaaaggggggggggtggcagagcacaggcagctcctgacctccctcttcttcccccccttatcgccccacctgcccaccccagacccagacccggagccggacgcactagcagcgagttctgcccggacttgagcgagactgggtgcgttgtcgcctatgagtgcgtagagctcccgggtgagcccgtccatcttgtccggtcctgccgtcgtacccatacccacaccggatagcgagtgagaatgagaggtcgtattagggttaggttgagatcgtttcctacccgtcacggacgtcatcgtcgaggtggatgctggatgatcagatgggtcgaggttgttggggttgagggctagatcgtcacgtcgtctaccttcgatctggatgatcttgcgcatcgggacgagcggtctctgtggctcatccgcgtctggcccgtcatcaagggtcgtggtcggggtcgtgatcgtcgtcttgacgtgctcgtcttgatctcgcattgacacctgtttctgcgtacccgtctgtacctgtacctgcgcctggtcctgaggttgtgactgtgatcgagcttgtgcgaggattaaagccgcctgagcttgagcctgggtggcatatttcccttgaggaggtggttgcaagttgaagttgaccgtcattgttggcgtcgttggggacgcgacgtgttcgacgtcttgcatggggcgcaactggatcgtcctttttacaagtatgtaaaagagatagcaacgagtatgaccaggcaactctagatgtctgaacacaacagtagtaggtgatgatgtttatgaacctatgtcatcttaccctctcaagtgaaccttcaagtgttgattttgtgacgttttctttgtatgcgcgcgtgaaaaagttggagaaaagtagaaagaaaacctgaaaacacagggtaacaagggggcaacccaactatatacctattcattcaatcacccccactcacactcacatcttcatcactgccgcccccaatacaaggtacaggacgatagaatcaagccgacgacgacgacgacgccaaggatgcccaagaaaccatcagtcttccgtcaaccgggggcgcaacactttcagctcgtccatcgatcacaacgtgacccgctcgtacacgatcctgatgcacctcaacgattgttcaaagaggtcggtcggttgaacgacaagcaaaagaatgtgagtctcctcaaatccacaccgctcgcagatgagggaaaaacgtaccacctcccccccccccccccttcaaacacgccccagcccagaccgtctcaatgctgccaacaatcgtcgctccgaccagaatctgcgccattgggccaaattcggtatcgaaaaggcaaatcacgcgttcgttacgggcaaacagattcggcatgttctgagccgtgagatggttaacggagaagagatcgcccggcacgtagatcatctcacgcagaataccgttgcacggcatgtgtacgcggtggtagtcacgcggggagaggtaagtggtcacaaacgtaccgttgcggaacaggtccgccatcagatagttgcctgccagcagggcttcgaggctgtagttgtggcctttggcttgcaggattttatcttcttcgattttacccaactggctgataacgccatcggcaggcatgaccagtacattcggatcggtatcgattgggcgtacttcgtcacgcagcggacggacaaagaattcgttaaaggtgcggtagctggcggtgtccggcttttgcgcctctttcatgtcgaccttgtagtatttaacgaacagatcgataaccagttttgtcagccatcctgcccgcttgcttgcgccccaacccgccaggcgagtaagccatagtttcggcagaatgtactgtagcgaaagtttaaatgaatttaacaaggtagcctccaggccattgttttgtcgttcctgatccggcctacatgccggatcctgaaaaaaaggggacgattctaacgacggttagcttaattgtcagtcatccgtatcagaaaagtttttacgcgtttttacctgcgccatgctttccagaatacggtgatagttttcgaaacgggtttccgcgattttcccttcctcaaccgcttcccggatagcgcagcccggatcggtatcgtgtttgcaatcgcgatatttacacagacctaaatagtcatggaattcgacaaagccctgagtgatttgttccggctccaggtgccagaggccgaactcacgcactcctggggagtcaatcacatcaccgccgtgcgggaagggatacagccgagcggcggtcgtggtgtgctgaccgagcccacgagacggagctacatctcgtatgccgtcttctgcttgacaaagaaaaattgatcgattccacgggggaaaccaactatgtctattacaacgtgggtaaggcgaccatcgaagggattgaagctacggcctcggttgataccggcccgttgacgcatcagacatcgaaacgctctctctctctccaccttggatacacgccgcacagtggcggatctgcgaggtcatgcatgtatataaacagaaaaagacgatggtcgacagtggtgtcgcgacattgaatattcaattcgagtcgagtcgagtttacgtaattcttttccgacgattcgtcacccaaagctcgaccaacctcacactcgaccacgtttcctcgatcgagagaatcgccacaagtgacaagcagatatcgtatcattatcatcaaacctcgcccagccgcctactcgatctcttacaagatcatccctatagacattgatcacacactcacttcatctctctgacggcatgccacgacaaccattctccgactttctcgacttggaccaacaatccttctcgcctcgaggcggaaggggcggtggcggtggcggtagaggacgaggcggtggtagaggaggtagtgcaggaggcaatggcagcaacaaagcttcgttcggtggtttcggttctccctcaacatcaccaatgacccctgatatgggtcgcgggcgtggacgaggtcgaggtggtgggtcaggcttccgaggacggggaggggcgagcttgcgtgcggattacacggccgtaccaccgatcgattattcgaggatcaacaaggaaaattacaagaccatgaccggttcgtaccttgttctccatccctcctgtcgatctttcatctcgaaggatcgtacccgagtccgaatacgaaaagctcaatcgagccgtccaacgactgtccaggcttcactccttctcctcatgatcaatccaattcgacccgaggttctaccccacgcacgcctcgacgaccgtacgccacgcaccaatccacccctcccgtcctctctggtcagacgactcccaagggtcatccgaaggacgccggatctcagagccccaacgtcctaggatggtcaggttccccttcgacgacgtataataacaacaacaacaccccgactaaacgtggtaaacccaccggggtaggtttccccgcactggcttcccttcgaggccggggttccggacacctgacctcgctttcccgtgaattcacccataacaacaacaacaacaactcgcccggatcgagtcccggtccttctggcccccgcgggtctttcgccaggtactcggcctgtctcttatacacctcgtctgaggctgcccgtgaggcgtgaaaaatacacaaaaaacctgttgacggtgtggttttgacgggcgtagtatttcgaatactgtatataaacacattgttataaatacagtttttgctgtttttaaaagtcaaagaggctaattttatgagtacagagttaaatagcggtactgtcggtggttttggtcacatgggaccaaatgacccctacaatgatggtcatagcggctctggaagttcgggaggtagttttaacggtggtggtaatggtggccatgataatagtagtggttcatcttatactgcatcctttggtctcatcactggccgacacccgataactgtcccaggtacgaagaatattaattctgtcgatctttctgctgtcattaataacattatacatcatgaaggtgcacgcaataacatgtacctagatactgcgaacaatgtaagagtgggagtgacgggcactggctggcaatgtctagcaacggcaggcatttcggctgagggtaaaagaactttccgctaagcgatagactgtatgtaaacacagtattgcaaggacgcggaacatgcctcatgtggcggccaggacggccagccgggatcgggatactggtcgttaccagagccaccgacccgagcaaacccttctctatcagatcgttgacgagtattacccggcattcgctgcgcttatggcagagcagggaaaggaattgccgggctatgtgcaacgggaatttgaagaatttctccaatgcgggcggctggagcatggctttctacgggttcgctgcgagtcttgccacgccgagcacctggtcgctttcagctgtaagcgtcgcggtttctgcccgagctgtggggcgcggcggatggccgaaagtgccgccttgctggttgatgaagtactgcctgaacaacccatgcgtcagtgggtgttgagcttcccgtttcagctgcgtttcctgtttggggtcgtttgcgggaaggggcggaatcctacgctaaggctttggccagcgatattctccggtgagattgatgtgttcccaggggataggagaagtcgcttgatatctcgtatgccgtcttctgcttgaaaaaaaaaaaaacaagattcggacagaggaaagagagcaacacactatcagagcgaaaagagcaacagatccgggaggaggagggccgggtcgaagagggcagggtcgaggagggccgggtcgagaggggccgggtcgaaagcggccgggagagcgggcagcctgacgaccccttcgtccgcatcgagctcgggttcgggctcgggctcgtcttgctgctcctctgccacgtactccggttgagggtacccgccccggttcctcgcggcttcgagggcctcttcgtacgcggcctcccgggcagcggcgtttcgcacggcatcgtctcgagcatcgatcattgcgaacgccgcttcccactcgacgtccgagtccacgtccgagtccgagtcctcgtcggtgtcatcggtcggcctttcgccgtagtcgattggcctctcgtcgatggcctcttcctcctcctcttcctcctcctcttcctcttcctcctcttcgtccgagtccgccgccaccccgcgtccatccagcgcctcgtcgtagtcgcggtccgagccctgctcgtattgctcccaccgcggcctgttctcggggtggtcctcctcgtcggattcggactcgacgccgtaatccttgtcgtcggagtcgtcggagtcctcgtcggagtcgaattcggagtcatcgtcgggcctctccccgtagtcgatctcctcgttcgccgcaggtggctccgccaaccccaggatctccgcgtccacttcggcggcgcgacgctcctcctcctcggtgaaggcgcccatgtcgacgtccagcgggagcgggagggggatcccgggcaggacatcctccgtgtccatctcctcggctgctccgtcgacgtcgtcttccgccatcccgtgatcgacctcgacgtcgacgtcgtcctccgccatcccgtaatcgacctcggcctcggcgtcgtcttgttggtccattggggcggtctgggccaacagagcgaggagaccttgggcggccatgtcgacgtcgaagtccacctgaggagccgcgacctctggctcaggtacagccatgtccacgtcttgctcatggacagtgccgaacaccggttgagcctcttgggattcggcgacggggacaggggcgacctccggaagagcgacgaggggagcagcctcctgaggagcgacgaccggggcaaccccctgaggagcgacgtcgggggcggtctcctgggcgggggcgacctggttgggggcaaagatcctcatcctgtagagcttgggagtgggctcggactcggtggggagcgatcgcccgaggatggagtattcggtgaatcgggccatggtttctagtggggccggggtcaggaggaatgagcgagatcagctttcggtcaacgagaatgggtgtacaggcgcggcgatcgagacgcaaagagagggcaaaggagtgggggacgggagagagtggacgagcaggcaaagacagatcgatcgcgttcccctccgaggtccgacgttggtgaccgttgtcgcattcctaccgggtaaggcgaaggaggttcccgttgaatcgccttgcaatgccgcccaaaatgagattgttgaagaagaacccgatgttcgcgtcctttgtcgtcttttcccgagcacgaccaaacggtgcaggcgacatcgagtatcatccggacgaccaaccctcgtccaggcaggtcgagtggagcccgaccttttcgcccgggctggtcgccgaaacccactcgactcgactcgtcgaactagaactccccgaacgtccatcccgaccgggacctcgcatggccgtcttggattaccaacctcgagacccagagaatcacaggagatgctcatgctcaggatcggacgtccggaggggtgacgatggatcgtttctagcgagtagacgctggctgtcggacgttggacatgaagcacctcgagtggggtcgagcatggtggaacgagcgagcgagccaggtcgtcttagcggacgatgtggctggacatgtgggagtctgaccgggggtctttgggtatggttgtcgaggtcgaggtcaacgtcgagcgtggtcgaaataggcgtggctcgtgtccgtgacccttgagagagtcagcgaggaggggaggcgggggacgtacctggtacccgcagacacatggtttgaaattgacatccgatggatccaactcttccatgcacaatgggcactctggatcttcctgccgatggttcgagttgggtcgattgaaagtaggggagtagggtcgacgtggacgtggacgtcggagtcgttgcgtgcgcgggataggaggagaaaagttcgggtcagcgtactgtgatacgtaacttggggacctgaaggaacaggcgaacgaagtccaggcggggtggtcgatgtggacctttgtcatgccgctattcgaccgcgatctttccctctctctctctcgctcgagccggttcaagtcgactcgaacattggggacgaccagggacgacgtgtcgacggtcgaacaagaatcaaactcccagacactcacctcatcgtcactccaaacgacatcctgcaagttcctcagcacatccttgctcacccccgcccctgccgctgacgaactcgctacggaagctcctcctccaaacgcgctagaccccaccatcccgctcaacccgggtgtacctgccgggctggagctcatccccgtcgatcctagcccggtgggtacgctacccaacgagttcgagttcgtggtcgtaatcttgccgtacgtccagggagaggcggccgtggtggacgaggtgaacccgagggagatggtagggttgtttgtcgtcacgtgtggcatctttgcgcgaggggaagatcgtcttgataccgagagatttcgagaggtcgatggaggatccgggtcgggaggtcggaaaggatgtcggtcggtcgacgttcgggttgatggatggcgtcgaaggtccgagtcgaggtcaaattacaggactgaactgaaggaataaccggaaagagatcgaggcgaggtggtgcaacgtgctgaaactgagagatggagagatgaggtggctagttgatggatctctattgatgtgtacgatacgatatgatatgactttgcagtgagtgaaggggggaggtggtggtggttggttgtgctcaggaagagtgacagggcgaaggagaggaacaaagccgcgggagggagcagggcggcagcagggaagccccccccccttcccctcctctggtctctgacgaacgccatgcgggacacgcgatcacagagtgaacatcaacctgggtgaacctcaagatcgacggatgaccacggggttgcacaccgtcagggatatccagtgcggcaagtgcaagcagacgttgggctggaaatacgtgagttggagttcgacatcgagagcgggtcgggcccgctttgggggcgagggcgatgtaggagcgggcttttgaaagaggctgacccggttgaactcttcgcttctctgccgacatgttcaatcgtctcgacatcgacctcgacctcgactcggcgtgatgcgataccaggacaaggcgtacgtcgatgatcagcggtacaaggagggtaaattcatcctggaaaagaacctgttgtgtgacgtgtgagtccacggtcgggagctttgcgaggagcgagggaggggatgctaatcggagcgttgggtttggggggattcccgggtcgggcgaatgtatagaaattgaaacgggattgcagggtcgggaatcggggatcgactcgactcgattcgcaaccggggatacgctccctgctctcctcacgctcaactcttctcatcttccctggctctcgacagttcccattctttctcgtggacatttctgtatcaacctcgcctctggctggctctcttgatctcactactactgtctccatcccaactcattgtatcgcctcgtcttcccctttttaatccttttcttgtcgtctcctggactgtcgttccgttgtaacatgtaccctctgctggctccctactggctcgttgtacgatgtaccaaatgtatgaacgataccgtgatcgggtttcgacaaacgaaacgacaagaatgtctcgatcctcgtaggtgcagactcggatttcgcctatgagatggggaacttctgctagtgatacgctgaaacgtgatcgtgctcgcgatcgatcgggctgggccggttccccgacggagtaagggtcggtggtcggtggtcggtggccgtcagcaccacgaccttttggtcagcgtttcgcagtcacaccacgcactagtctctgggtgaggggggcgaggggtgggattttttttcaagcagaagccggaatacgagctctgcgcatgtctcgtgggctcggtggaggaaaagggtctggctcgggtggcaattctacccagggcccgcgcccgcaaatgggtggccgcattgtgggcattgtggccgctgccgtggtcatcatctgggctgccagcgggttctacaccattaaagaagccgagcgcggcgtggtcacccgttttggtaagttcagccatctggttgagccgggcctgaactggaaaccgaccttcattgacgacgtgaccgcagtgaacgtggaatcggtgcgtgagctggccgcttccggcgtgatgctgacctctgacgagaacgtggtgcgcgttgagatgaacgtacagtatcgcgtgaccgatccagaacgttatctgtttagcgtgaccagcgcagatgacagcctgcgtcaggccaccgatagcgccctgcgcggtgtgatcggtaaatacaccatggaccgtattctgaccgaaggtcgtaccgttattcgtagcgatacccagcgtgagctggaagagaccattcgtccgtacaacatggggatcaccctgcttgacgtcaacttccaggccgctcgtccgccggaagaggtgaaagccgcgtttgatgatgcgattgccgcgcgtgaaaacgaacagcagtacatccgtgaagcagaagcgtacaccaacgaagttcagcctcgtgctaacggtcaggcgcagcgtattcttgaagaagcacgtgcctataagactcagacgatcctggaagcacagggtgaagtggctcgtttcgcgcgcattctgccggaatataaagcggctccggaaattacccgtgagcgtctctatatcgagaccatggaaaaagtgctgagccatacacgtaaagtgctggttaacgacagcaaaggtggaaacctgatggtactgccgctggatcagatgctgaaaggcggttctgcaccggcagcgaaagacaacagcggtgccaataacctgctgcgtctgccacctgcatcgtccggtagctcaagcgcaacaaccacgccttcttcgaacgatggtgacattatggaccaacgccgtgctaacgcgcacgatggtctgggcggggtgcgggattttcatcgggtggcaaggaatcgagtggaaatttagagattggggagagtcggccagatatatcagagccgagacggacgagacggtgagggcgaaggagcctgtaagacgggaacatatggaggtgtaaccgcgtctctgatcgcgaactctggacccactgatcaaacgcatatatcatgtaaatttcgaacaaagctccgaggcgcttgacgatgatccgacgcaagctgtcgagacgaccgagtccaattccggctgaacaggtaattcacatatgtatgtatactcttcatgagccgctgttatagcagacaggcaggactgggaacgaatagataagggagaacgaaaatcgaagaaaagaagagctaccgatcaagggcatattgaaattctgcgcgcgagggagagagctgtatgagtctgagtggaaaaatctatctgcacacgatgtgccgtgacttacagaagtgtcggttccaggccgttccacaagcatccacggatcaagcggcggtcggcgtgataggggcctttttcgagcccgtcttggcacccttggcgacgagagcctgtattccagaagaaagagatcgaccggatgagctttgtagcccatctcttcctatcacgacgacgatgacgaaccttgtgaatataaggcaacacaccacccccagcgatggtcgcctggaccatggcgtccaactcttcatcacccctgatggccaactgcaagtgcctgggcgtgatccgcttcaccctcaaatccttagcggcatttcctatgagcaggataagcggacgatgcgactcgtagtcagtgcctttttctgatcaaaccgagcgggaagatagcccattcggggctatggatagggtaatagaagggaggtgcgatttaccagcgagctcgagcacttcggcagtgaggtactccaagatggcggccacgtagactgctgattttgccccgatccggacctgattcttggtcgacttcttgagaaaacggtggatacgaccgacggggaactgtcgggcgatgaatagccaatgcagaggggggggggggggaagggggatcatgttcaccggctatgccagtaattccagtattgttggaggaatagccatctttggaaaatgaggtcgaattcgataagttaatttggtgacgtgttttggcaatatcaggtgatgctgccaacttactgatttagtgtatgatggtgtttttgaggtgctccagtggcttctgtttctatcagctgtccctcctgttcagctactgacggggtggtgcgtaacggcaaaagcactgccggacatcagcgctatctctgctctcactgccgtaaaacatggcaactgcagttcacttacaccgcttctcaacccggtacgcaccagaaaatcattgatatggccatgaatggcgttggatgccgggcaactgcacgcattatgggcgttggcctcaacacgattttacgtcacttaaaaaactcaggccgcagtcggtaacctcgcgcatacagccgggcagtgacgtcatcgtctgcgcggaaatggacgaacagtggggctatgtcggggctaaatcgcgccagcgctggctgttttacgcgtatgacagtctccggaagacggttgttgcgcacgtattcggtgaacgcactatggcgacgctggggcgtcttatgagcctgctgtcaccctttgacgtggtgatatggatgacggatggctggccgctgtatgaatcccgcctgaagggaaagctgcacgtaatcagcaagcgatatacgcagcgaattgagcggcataacctgaatctgaggcagcacctggcacggctgggacggaagtcgctgtcgttctcaaaatcggtggagctgcatgacaaagtcatcgggcattatctgaacataaaacactatcaataagttggagtcattacccatcatccagaatgatattccctgcgacagcaatttcctgctcctttgcaaattgccagtggaaaggtttgccgctgggataacgaaatacaacacattgatgattaagcagatcatgaggatggcggggtttgccatatcttgcaaagtactctggcgttgctgctacacataatttcactggtcagttccaccccacctctccaccacccgctcatccccctcaaccctgcaaactcgccgtcctcgccgaacttgcctttactgtagtgtcgctcgtcgtgcgtccagaaggtgcctacgcgaggggtgaacgacggatccgaggtgaggcgggataggtagagttgacggttagacggtggtttcggggtattatcctgctgcgtcgtcggacgatcgttctcctcgacgtcttcgtgttcctcagctcgacccgccggttctgatccttccccggtttgtcccacttgctgctcatcccgctcacggtcctcgtcctcctgcttgtcgcccatcgtcgtcgtcggcgtcgtcttcgctcccgcgtgatccgtggacaaccctcctgccccctccctgatcttcctcctcttctccttgttcttcaatcgtctcttctccttgcgttcagcttccttttcctctctcgtctttttcccagcgtgtgcggtcgtcgggatcgatgtcggggcggtagcgatcggatgacgatcaggcgctggtgtttgcgtttgtgtcggtgcttgtgtttgtgatttctgtttttgtttgttctgtttccccgggagagatctttcctggtcgggcgtgggtttcatcatcgaaggtccagcgggagtggcggtgaattcctcgaaagtgatctcttccttgtcgtcctcctcaccctggtcttcatcgtcgtcgtcctcatcgtcgtcagatctgcgtctagccctacggccagacttggccttgaccttgttcttggatttattctgatccttgtcccgcctgacgtttgacgacccggtcgacgtctgacgatctccggctacccctgccgctgtccctgtcccagctacgtcgtcgacatcgacatccgagacttcagaatccgagctcgatggcgaggaggaagataccgaagtcgatgtcgaggcggacgagtgggaagaggtgcggcggtgacggtcgcggtggttgggacggggtttggtcgttgatggagaggcggcgggcatgcttgatgtcgagtttgtgtgatcagggggaggcggggtggtgggtgggtagcgatagatggctatgtgatcacgaatgtaaggtgagcggatcattgggtcatcgatgaccaggacgacatgcggatgggcagacagctcacggtgtaacgtttcgcgagtttcgtgaatctaggcgtgagcatgaaggggtttctcgattagtgaccgatctttgaagttgaacttgtgccatctgttgcaagagtacatgatccatgagtgctgattggattggcactatgaattcaagtctgactagacactttagtagcgaccaacctggtcaaaggagcgaggtcgcgatatcggcgttgaccgagttggcgatgacgagagagacaaagggggagggaggacaaagggggaagaggtggaggcgagtggaggcgatcgaaatgaaatcacgtgattcatgtgatcatctctcgtcatttctcggcttcatcccaaagttaatctcggcatcttgctcgtctctccgcaccattatcgcccgagcagtagcttgtcggtgactttttgcttccggcctcttccctccctgctgtgccctgccctcgtgacgtttgtgaatattgaatttcgaatttcccttggttccgtacaggcatgcagcttgcaggcatcacaggtgctcaagtgccattcccattcaaactaaaagttcgaaatctcattcgagagacggaaaaatcgataaaacgaccatgtaatcatcgattcacaggccagagattcgaattcatcgaggcaggcctggggacggtatcgggtcagatcgcacacacacatcatcatcattcgggtgcgcggttttccatcttgtcagatcgcaggtcatcaaggctgcattccataccactcgtcgccatggtcgtcgtctgtcatcctcatgtgattcttgctacatccctggtaaatgtcccgtgttgtgtgcgtgtctgtgtgtatcttcctgtgcttgtgtcgatcactttcgctggagccgctcagatagcaagtgtcgctagcttttgggcgtttgtgttgcaagtgccgcaaccgagtcccctgccccttgcctttcggccgctgacctccggtaatcaagaaaaggggaaaagcccggcaaccacggccggttatgccacaatcacgtgacgcatgggtgaatacgtcattctcggttacgtgattttggggaatttacatccgaaagttccgctcactcaagaaaagcatccggtaatccagactcgctcggtcaatatgggacaatctgggggaaatcattcgatcctgctcagctttccttttctgaattcgctctcatccgcccgcatctaaccccccccctggactcgcctatctactcaccgaagtttgtgcccccggttgtggtacccaacgatgccacgaccaccgatgcgcaatcgaccctcgtcggcgctgacggccgaacgaccggctcatcttccccacccttcggccccgttccatccttcagcggatacgacgacgtacaaggacctcctcctattcgaggagaggttgaagatgaacgcgcagatgctgaacaggcgaagacgacggtatgaaggtgcgcaatgcgttgagtatgagctcctggtggggtggcgctgatgacaaccccatctccacgttctgctaatcctcatcgcagcctttctcgtcactctcgtcctctcgatcgtctttctcgcccatagagccatgttcaagccgagtgaggtgagcctggatcgacctaacgcgttcctcttcgaaccccttgtccaaggctcactttgacgtctcattcctctcctttcgccgatccccttgacctcggatcaacttctcctaccaccacaaccctccgcctctttccatcgatctctcgccacagctacatctcgtccgatacctgaccaaaggcctcctcgctgtcgccctcgtcaccctcgtcctcttctttgccagcgggatgtaccaagaacggatcgcctatgccaacaagtacgtcccgcacgcgaaccgcgcgttgagggggatcaacatgcatctgaacatgaggaggcaggggagcggggggagtctcttggggtggatcgtcaggcaccaccgctgcaccaccccccggcgcaaatccgagctccgatcaccccgtctcgatcctcccaagaccatgtctcgactcaagaaagcctttcgcacgaacacgggttccatccctaccacctcgaccccggggggagggtcatccaacaccctcggtctgaacggatcgtccaccggtccaggtggtggggcgggtaacgccgggcatgggacgtcggcctcggagaggaacaccccgcagagcccagcaccggcaccgatgagcgggatgaacgagtttgtcctctctgcactcgtcgagaaagagatcgagctggaggtaccggagagtcacaaggccatcgcggacaagacgttctttgggttggaaaacgtgagtagtcgtcgtcgttgtcgtcatcgtcgtcaacgtcaacgtccgtgcccgcgctcgtgctgacctcaattcgaactctcgctgcccggtcgagatagttcggaaacacttgttattgcaattcggtcctccaggcgttgtaccactgcgtcccctttcgacaactcgtggattcataccccaaccctaccccggcgacgatccccaacggacctaccccggcagagatcgcagagactttccgagcgatcgaagcgaacggtggcaagttgccagggtatgaacacttggaacaggtcgcttcgaggggtcaagcggacgaggtcgtcgaaccggaaaagacgcccaacaaggccaggtggagtatgggtatgggagcgaggaaacagtcgagttcgatcttgcccacgccgacatcgcccgcagctcgagggaatctcgcgaggttgcacacgaacggcgcaggtggaggtgcagcaggcgaacctacgagcccattgtcaccgggtgccaacgcggccagcttgccagtcgttcgacaacctaccctgccggccgccaccacccctgctccaccgagggatccaaacttgcccccaccatcggtcctcagcgccgtccagtcgttgttcaactatatcgactcttccccgcgggcggttagattcgagtcggggtgtgaggttctatttcagtgaatgaagtgtgtagaggatagtatgtgtgggtgtggatgactctatgggttgaatggtcgatgtagaagtgacaagagccagagagagtgtgtgtgtgtgtgagtgtgggaagtggaagagggcgcaagttgaagttgaacgagatgagatgagttgatcacgtgaaaacacacacgaacatcaactatcaaccaccaaccatcaacctatcggtcatcagcgatactcccttgctacctattacaacgacaacgacaactacaccccaccacaccactcactcctgctactactgccactggcttacactgccgacgacaaccatgaacacacaagagaatgaaccaccaccgatggactttatagacccctcaccaccaccatggagacgtcccttggttcattcactcgcgacacacgctggcgatctaggtcagtccaccggggatggtcgtcgtcgcatgccgttgctcatccatccacaacatcgtcgtcatcgtcgacttgatagggttcccggatcatcaccccgctcgaccgggtcatgagcaaaaggaagacctcctcaccccgctctcggccagacaggggtacgcaccccctaataccaatccaccgggttcgggttctcaaatcggtacgagcctcgtcatcggggtcggggtcgggcgacatcatggcaaacacgggtcgacctcgaccaggcacgcctctggccttgccaccagcaccaacccgaactcgaactccaactctgcctcgacgaccttgtcgacgacaacacactggggtccacccatccctacaggtatcgagaccgtctccctcgccggacccatctacgagaaactcaagagagaggggatgtcactccgattggaaacgatggcgagggatgtcgagagggagatgaggagggtgaggaggaggaggagccgggtggggttggcggaagatggacatggcgatgaggatggacatgtatcaccgccgtagtggcggcgctggtaacgagaaaagacctctgtgaggttcacatccgaactggccagacggaggttgctgttttcacggcttacgaatccgagtaagagcaacggcggggagtgatcccataagcgctaacttaagggttgaaccatctgaagaatgcgacgcctcggtgcctcgttaagacgatgcctcgcgttcttcaattgcgttttgtaggctgtcagggatactgtcccacgaatggccacctgtaagctccagatgaccatttttgttattctccacaacgagttagttcttcttttcggatccggcacttctgggggggaaatccagcgatggctggattatgtcgtcaattaaaaatgcggcgagtagattagcaaatatccacgctttcgcgagttcaggttcctttgcacgcaaagcatccaggtgcagcaaacttttgagccgcttaaaagccagttcaatttgccatcgcagacggtaacaatcagccacttgctctgctgaatattcatcttccggtaatgatgttagcaatagcacatggcccgctgcttccagcgtttccgcctgaactactcgtccttttcgacgattctcgctgagcagtcgggttttactgattaatgctttttcgggaggaagtgatacggcaatgagacgtgccggaaagggagctccggcttttttattacctgaattgcctatcattacagtggtttcaccgttcttaccgcaatccagcccgcgcagaaaacccatcatgtcaaagcgcattccttctgcagttaaccagcgcaatcctcgccagtgaacccggacgatataatcagcttctccaaaagcaagtgagcggatacattcgggacgcgaaccgaatccccggtcagcaatgcgtatctcgtatgccgtcttctgcttgaaaaaaaaaagataataaccacaaacgtagcagtgacagaaacaagtgatcatgccctgatgatggtgataagcgggtgtttgccgtagagaggaagggagagttgtcgaggggcatgtgtgttgtcgatcggaggtgagacccgcctgtgcgtgcgcgtcgagcgtccgagtgggaaactgacaagtcgtcatgtcgtgtcgtgtcgtgtcgtgttggtcgcgcttctcacagggggaccggggaacagtcgtttttacgtaccgaatctgatttctcgtcgggcgccaacgagacgtcgtcgacttccaaggtggactcgcaacaacaagccgggccggtgtcggccccgagggtcgtgagcaagacccctgggagcgaggtcttggagaagatgttcttggagagggttttcgggtcggcagcgtcggcgtcggcgtcgtcctaggtgtgtgaatcgagtcgagcgaaagggatgagaataaagatgaaatcggatgtaatggaatgaaatggtatgcatagggtattacatggtagccaccagatcctcgacatcaagttagaatccctgtgcgggacaacggtacctgaacaggccgtcaatgcctgccgacgacgatcgttcgatagtcttttgggaccgaacgcgatcgttggctttgaatccaccgacgcatacgcgcgggatccgatgatctggtcatgggctcatgggtcatggatcgtcagggatgatatatctcgtcttgatctcaatgcatatatcgttgttgcgtgtttcaaaagctcctcgcccttgcatattaggccgagctcgatcgcagcgcccctgcttactcttctgctaccattcatccatcgtctcgtctcgggggctcgagtgctccgaggtcagatgtgatgtgacacccatgacaccctggatcgaatcgagtttttgaattccgaatccaagttcaagccacagcgagcgcgcgggagggagaaagtggaaaaagggtgaaatttacttccggaaccacgggccgcgtggggaaggggggggaggcagggggaagcggatatcgactagaggggggatgtctaattgagccaagctcgaaggagaggttcgtcaccaggagcaggagcagcagtagcgtagtgagagcaggaagagagtggtgagtgggcgagtgtgtgtgtgtgtggcaggtggcaggtgcgtgggtgggagccggagaggattaggtcggatcgggcgtcgggtcgggtcgtccctggatgatgatgatgaagatgatggtctcggcaatttggagatttagcgcaggataaagacaaaaaacgagcagcaacaaacgacgacgaggtctcgaaatcggttcagcatagattagagagtagcgagtgatgctgggtctgtaagaggatcgttagtgtgctcagtcacgcacacacaccctgtggtatcactcgaaccagccatcatgactctcaccctcactcctgcacacacacatacacctaccccactctgcacggatggctccgaagaagatgaggatgtcggccagtggagagccagagagggagtgtgtgtgtgtgtaattcaatttcatttacccctgtccctgcctgccctgcctcgctgcttcgctgcttccgtcgatgattccgcgcgcgttcaaaagccagcaagcaagccacccaacaccgttggctagctcgcacgtccctcgccacggccacaccccagcccggcaaccatcatatcgaccacagtggacatcacactacaagtgacgtttcattattatataacgacttcgctagacttccgactcgactcgacgtagagtcagtatcgccaacctggacgtacaagactcgacccgcgatctcgcgactccgcgactcgactcgtcctcttggaaacgcgcgagacgatccccgtccccgccttctgcccccacctgacgggtccggaagctaatcaatcacccttccggctggctcacttctcattccaggcgcgtggcagccaccccaacccgtggggcaggacaggggtagcagcagccagcttggacacgcggcatcttacctgggctgggtcatggcccgtcgccctttgtcgccgtcgtgcgtcgtgatcgtgtcgagggctattcgggacctcggcgtcacacagtaggggtctatgacagcagagtcagaggggaggacggaggaacgggtgggtggtgcaggggcacggagagagaaaaggcggggaaatcggaataaacagacacacgcagacgtgtaacaagagacatttatcatcgcatcatcatcatctcatcgaccgcgacgacagggccagaagctagaagtcagtgagagatggtgaaagtcaagactcggccagatgacagcagactcaaatccacttcgggcttgaaggaccatcttgtactctatcttgtagctgcgcgtttgtacttgcatacttgactgtatttgtgtgtggtgtagttttggtgtgtgcatctgtggtgtggcacgctcgcgtcacctcgctgctcgctggatcttcccgaaccccgacgacgacgaagacgaggaggtaggccgaatatacgggtgtttaccccacattcaatgaccaagtcaaatcctcgccgttctatcaaacacatagtgcgagaacgtagtctcgacagggtcgtcataatacacaagtaggtagtaacaactagccgagccagtcgcgaggacaccccggacggataccaaggtagcatcgatcgggataacaccacgccgcacacgagaatttaggtcgtgatcgtcaccgtcgtcgtctgatcacaactcagctggaccgcctcgtcgaataaccagagagataggcgtccatcgtcggcatacaacgtcaatcacagccgtcttgcaacccttctcgctcgttcatcgcacgatcgaacaccacgaacaaaccccccttaccaccccccccaccacttgttttttttttttgtttgtggaagcgtgagacagcatacgaggttctgatcgttctctttttttttttcaagcagaagacggcatacgagatgtagctccgtctcgtgggctcggttaacgccggcgaggaagtgaccttattacaaactgacgccaacaccaattatgcccaggtgaaagacagctctggccgtaccgcctggatcccgttgaaacaacttagcactgagccaagcctgcgctcccgtgtgccagatctggaaaatcaggtcaaaaccctgaccgataaactcaccaatatcgataacacctggaatcagcgcaccgcagaaatgcagcaaaaagtggcgcagagcgacagcgtgatcaacgggttaaaagaagaaaatcagaaactgaaaaacgagctgattgtcgcgcagaaaaaggtcgatgccgccagcgtacagctggatgacaaacagcgcaccatcatcatgcaatggtttatgtatggcggtggcgtgctggggcttggcttgctgctcggtctggtactgccgcacctgatcccaagccgcaaacgcaaagatcgctggatgaactaaatcgccttcttcgttgcactgtcttattattaggaattgtgtatttgacgaagggatgatggcgtgaagatttatctggtcggtggtgctgttcgggatgcattgttagggctaccggtcaaagacagagattgggtggtggtcggcagtacgccacaggagatgctcgacgcgggctaccagcaggtaggccgcgattttcctgtgtttctgcatccgcaaacgcatgaagagtatgcgctggcacgtaccgaacggaaatccggttccggttacaccggttttacttgctatgccgcaccggatgtcacgctggaagatgatcttaagcgtcgcgatctgaccattaatgcgccagcaccgtggcgctgctggttaaaatggcatgactttgcgcgcgcagtagttgtacatcacgccgcgcctggggcgaagtgatccactggctttcgccgctcgccatcgccgtgcgaccatcaagcgatgcgccaagttttaactgaatataaggaaagccggtgcgcatccgcttgagaaagcctttattcaattgctcggcttcactcatcatcaggccgtggctgacgtcaatgccagcctgttgcagacggtaaagtccacgcccagcgacctgcgggttaggatcttgcatcgaggcaaccacgcgcgctacgccagcggcgatgagtgcgtcacagcacggtggcgtacgaccatgatggctacagggttcgagtgtgacataggcggtcgcacctttggctttttcacccgccatacgcaacgcgtgtacttcggcatgtggttcacccgcacgttggtggtaaccttcaccgacaatttcgccatctttgacaatgacgcacccgacattcgggttgggatgcgtggtaaaacgtcctcgttgcgccagctttagcgcccgcgccatgtaatactcgtcctgcacggcttagtcctccaggcgcgcgatctcttcgccaaattctttgatatcttcgaaactgcggtagacagaggcaaaacggatataggcgactttatcgagctttttcaattgctccatcaccagattgccaatcatcttgctcggcacttcgcgctcaccggtggcgcgcagctgcgatttaatatgattgattgccatttcgacgtcatcggaactcaccggacgtttttccagcgcccgcagcattccgctacgcaatttctcttcattaaacggttcacgcacgtcgttgctttttacgtcatgctgggggactggagggggggagagggcatcttggaaggatataaccatcaccatcgactccacatcccccatcacatcgtctcaatcggtcgcaccttcccaacccaaaaaaactcctttaaacaatctaaaaaacaacttgtgagtatcggtcatccctttcgatcacctttccggagctacgtacccttcactgcgtgctagaatctggcattcgcagagatcgtactgctcgatcatatccatccattcaattcccgattcctatcgttcatttcgggccattaacttacctacagctctctcttgtctcctcgcgaaccatcatgttccctactaccatccgaaactttgccgtctcagctcgatccaacatgtcgtgagtcctctttcgctctgggaaaattttgtccttgggatgagattgaccggaacaaacgtgtctgacccaaaaaccacccgctccattcgctcttgttcgtgacgtaccgcgccttatcgacactctacagcaaggtcttcttcgatatcgccatcaacggtgcccccgccggcaagatcactttcgagttgttcgacgacgttgtccccaagaccgccgccaacttccgtgctctctgcaccggtgagaagggattcggttacgccggttccggtttccaccgagttatccgtgagtcacgcttcgttgatcgctcgcaaactcctcgatagaggacgaccacacgctaaccatggtgatgtttgacgattatagcccagttcatgctccagggaggtgacttcaccaaccacaacggaactggtggaaagtccatctacggtaacaagtttgccgacgagaacttcaagttgacccacaccgtgagtccacgtgatgttgcttggatgtttcgggcggatgcatgtccctggtgccacaggagggcaggggctggggctaggggctaggtggggggcgagtcaaagctggcatggcagcgactgggcggcaaaccgagcagcgaccaacgaacgagttttcgggtaaaacacaccccaccaacactgaccctagcaatatagatctgacattcaaacaccaccaccaccacacatcgcctccatctccccttttacaacccccatcccatcacaaaagcacgaacgagtacgacgagcactcttcgacaagatgctctcccgtcaatcccgtctattcctcttccgcagggctcacacctcgtccccatcctccacctcctccacctcctccacggccacggccatcctctcgacgaggtcgaaatcgacgaaatcagaagccaatatcgtcaatttcgaagccaaagcgagggtcaaggagcatgctaggaggatacagacgagcgccaaggtcggcgtagaggtcgcaaggtcagtccgccgaggcggccgaggaggaggcgtttcggggagaactagagaggctgatcgtccgtatcgtaatcgtgttgcatacatctctcatccctcctatcctcgtcctggtcgtttttctctcggtaacctcccgttttcctgtctttggatcggatccatcgatcatcctcatcttggtcaaacttgcccgccatgactaccgaccacggaccaccccgtcacctctcctcctcctcctccccacaccaacccaaccttttttccaccatcctcttcccatcatcctgttcccacaacaacgccgacgacgacgacgacgcacagccgacccaccccagcccataagagacagctccaggtctccaggtcaagagacgcgccccgaatcctcgttgacgcactcaactagaagcgcagtgctcacgggtcgaagtactaagcgcaatcgccgcgtcatccccccctcttcctccacttgtcgacccgcggatcgctaacacacggcggggtgcgaggttaactccgatacacgcagaataagaccagaatcaaaacgtcgtcccctgggtcgcaggtcgcgcaggttgagacgaaacagaccgacgcggcgactccccccccgatacacaccaaacgctgttgcacgatgattagacgcaacagtcgtggccgagtatcgatatccaccgagacacgacgtcgatgctcctctcgagacgaggcatgcgatatgcgacaaacgcgatcccaccgatcagacgtgccccaccatcgacctatctcgttctcgtacccatgaccctcttcttccgggacttacacatgcatcatggtcatcccagcctgatttcacgcgggcgccccctcgtacagaccataccgatcgagtccgtccacattggtatacgtttgatccccgtcatatcgagcgcgagatcacaacatcgcgtcgcagtacccgaacgaatcgaggggtcccgtcaactgttagcatgggcgtgagcgtttcaattaccaaacgggggcctcggctgtcggagctatcggcgcgtttcattcatgcagtccgagcgctctctcgcgttgagagtcatgacctcgatatgtatcgatcgttttggaactcacggtatactaggcagtccctagttgacgaggacgggcgggagatgggtttcgcgcctagagtacctgttatccgctcgaagacacccagacttttctccgtgcgtcatcatccaacaagcaatcccctgctgattccaaaccagacctcgtcatcgtccctgacgtccggctgccgtttgacgtggctgtcgaggtcaaagctactcctgcgttggctgcggggacgatctcgtcgagatgtttcttgatccaagccgagaacgtcctggtgaaatcgagcgtgtacgtctcttccgccaacgtcggcgtcgtggcgttgttagaggttgtcgagttgatggtcgtcgtcgggatgacgctattgttcgggctgacggccggggtgatgttggtcacggtgggtattgaccgggaactcggcgtactcgtcggtgctgccggtcgattcctcaacgattgctacgacgaccgacgaccaaagacgagacggcacgagacgagacgatcagcccgagtcgagtcgagtcgagtccgtgcggagccagacccaggggtttccggggcacgggcgcgagggacttaccacttccaaccccccaacgacgccgatcaaccaacccatcctcccgacgtcgatccccttttcccaaccgagttccaacatgccttcccccttgatcccgtgggggacgttcttgccgagtttagagagcgggacgagcgggttggagagggcgagtagaaagttggaacgcatgagggggttgtggatggtccgcgtgggtgggcggtaggtatgtgggctgtcgacaccgggggcgcgaggtcgaggtcgaggacagggtcgcagtgtagatgtacgagggagagatcgaggatgacgatcagctcgtagtcgcagtgcgataccactcccaaccacacccccaactcacggtactagcccgaagggcatcaacctaatacgttagtgttttgacgttaccgacagaataagcaccggctaactctgtgccagcagccgcggtaatacagagggtgcaagcgttaatcggaattactgggcgtaaagcgcgcgtaggtggtttgttaagttggatgtgaaatccccgggctcaacctgggaactgcattcaaaactgactgactagagtatggtagagggtggtggaatttcctgtgtagcggtgaaatgcgtagagatcggaaggaacaccagtggcgaaggcgaccacctggactaatactgacactgaggtgcgaaagcgtggggagcaaacaggattagataccctggtagtccacgccgtaaacgatgtcaactagccgttggaagccttgagcttttagtggcgcagctaacgcattaagttgaccgcctggggagtacggccgcaaggttaaaactcaaatgaattgacgggggcccgcacaagcggtggagcatgtggtttaattcgatgcaacgcgaagaaccttaccaggccttgacatccaatgaactttctagagatagattggtgctttcgggaacattgagacaggtgctgcatggctgtcgtcagctcgtgtcgtgagatgttgggttaagtcccgtaacgagcgcaacccttaagcttagttgccatcattaagttgggcactctaagttgactgccggtgacaaaccggaggaaggtggggatgacgtcaagtcatcatggcccttacggcctgggctacacacgtgctacaatggtcggtacagagggttgccaagacgcgaggtggagctaatcccataaaaccgatcgtagtccggatcttgtaggggagcgagcaaaagtgagtagtgatgaaaatggcctggagcagatttcctcattgcagctcacaaagtgagtagatgatgtaggaattgctggatttgcccaagcttaaatctcaggttgcatctgtccccaggggtacctgggagaggcaagaactgtccttggcacagaaggcagagcatagcctgctggctgtgctcaccaagtgctcccattctgagcgcccacagggtgttgagtaccaggccagtgtgtcaggcatgttctttcttctcatcctcatcacagctcttgaaggtgggttgttaaagatgagtaagcccctgagaggttagctaacctttcttttttttttgagactgactctcgctattgtccaggctggagtgcagtggcgcgatctcggctcactgcaaactctgcctcccgggttcaagcgattctcctgcctcagcctcccgagtagctgggattacaggtgcccgccaccatgcccagctaattttttgtatttttagtagagacgggtttcaccatgttggccaggctggtcttgaactcctgacctcaagtgatccgcccgcctcagcctcccaaagtgctaggattacaggtgtgagccactgcacctggccagaaggtattgatattaataggtcatgacagaaagctgcagggaacaaaactgaaaggaggggacccactggccaaagatgaagcagctccagcatgaagaatgatggacaatgcctgagttcataatgacactaaagagagtcactgatcaacactgaagtcgccggagcgccaaagaatcgattatttatctggtacttcccacccatggtggaggagccgggggaggaggtggtgctccgtccgaaggaggcggttttcttccaaagttgcccatgtccactgtatttcgtgcgagaagagccgtccccaggcgttatgtgagaagaggcgggtcgcaagcggaggggatgggagtccagatcgacgtggtacgagacgatgcattgccgagcgcaaagtcgaggtgcccagtccatgtcgggttgtgaatcagggtcgaaagccaaagtcaaagcgacgacaagatccaggttcagggaagtaacgaagatgcgattacatgacaaaaaaacgaaacgagtcgaaatcagcctcctacttcaccttgcatactctgaatccgcgcgcactgacctccggctcgttcacccgcgttcctcagcatgggcgttcctacgctcttgcccactcccaacatcccccctacacctcttctcagttcggcgaaatctacacccccgatgcctgggttgttcgcaccggggtgacctcccgggggtgggggtggaggaggtggtggtggtgcacctccatgggactgggtttgagaggtaggaggatctcggagtccgagtgccgaatggatctgattccctgcgatcctcgctttattcgcgtgtcctagcatctccctcgcgctcatcccaccaccaccaccgagtgcacctcctgcagccttacctcccggtcctgcttgggacgcaccgggttgtttgcccatccccaatgcagaatgtaaggaattcccagcgttcctcgccgcttgagctgcggctatggcgcctgccaatccacccaatccacccccacccccccactcgtgctcttctcttgaatcggccgagagcgaaacagagcagccaaggataaatcaccaccaggccaacacaagtcatagccatatgccgtaggcctcgtcgacctcacagctactggcatcgttgacatcacaaaacaccctccagggaacgtctagacagtcatctcgatcacggtctcgtcgtattcgccgacggcattagcatagcacacttcatcatgtcgaccgccgacccgggcatggcggaccaatccgcaaccccgcattcacctacctcgacgacccatccttcctcgttgctcgaccctccgaacccatccctccagcccgtacaaccacccggctccatcctcttgaaccgtaacgacccttcctgcttacctccctctcaactagccgcactcgggatcctcaatggcaacaacagtaacagcaacagcagttcgagcgggagcggtgggaacaggtctagagtcgccagcgccatcaagagctcattctccatcaaagacatcccttccggtaacgtccgtatgccaggcccaccagcgtccacgtttaatcgtcgatcaagaggaaactcgatcggagctggaccttccacgtcggtgtccggttcgttacaccgctcaggctcgacgtcgagctcgtctcgttcccccttggtccagttcgccccgcttccacatgtccccgaactcgagcgtcgacggtctatcaccctcggagtggccgctcggagtgccatgctcaagactcaggggagtcccgctgccaacgccggcggaggaggagggggaggaggcgagaacacgcaccgatcgttagccggacgcgctgcgcctttccttcgtcgatccgccgcctttttttttttcaagcagaagacggcatacgagattacccacattttcgataaataaaagcgattgcttttttagggaaatatcttgtatggcgtgactgatcatatgggcatccaaatggcatacttttccagtattaatttgccaggcatcccctccatgagattttagcatttgggcatcacaatttgtttgttgatcacctactatgactgcaatatccatttccttgccaagatctgaaatggttttggaaagcaatgttgtcttcccggatccaggacttgacatcaaattcaaaaccaaaattttatgcctgagaaaataatcccggttatgagcagcaaattcattgttttgcgctaaaatattctgttcgatatcaattgaatgttcatgaggcacagaatgctcatggtgagtagcatggtgctcattatccatggtttgacctttttctactgaacatccgcatatcccgcacattattccaccaccattgatttcacttttaattcttcaccttttgtcagtgttaaggaatgattgccgcaaaccaggcattcatcataatactgtttcatcggtacaatttgttgacaagaattgcatattgcttcacctgggatttctacaatcgataattctgcattttgtgcgatcgtcccttgagttatcactttaaagctaaaattcaatgcgtgtttatcgactgctaccagctgcccacccccagcagccccccgatcgagaagtaagcttgaccacctccccctccgcagtcgaaagaatccttactcatgcaaacaaaccaaatcgcacgatatacaactcacttgaacgatcactccgccactgcaaaagaacagaggcgagaaactctgactttcccttctctcgaaacaccaacttgtcgctctcaacacgatggcaaccatgcaagtcaatcctcaccctcgatcggccaactttcaagaagagtttggtgaacgatgggtagaacaattcaaccccgattaccaaacctggttctacgtcgacaagacgaccggacaatccacctggacccagtaaggccggctcgaccgccacgacctgtaccaatctcttgctgacccccacgtcttcatcctgtgcgacgttgaacagccctgcagacgcccaaccttcttatgcaccaccttccggtcctcctcccacgcacagcgggatggacaaaccttcttacgaatccaccccgtcctactcggccgccaactcgaatccgaacctgaacctcggtgcatccgggtaccctaacgaaaaggcgtcttaccagcctcaggggcaaatcggcggatctgacgcttaccggggtcacgaatcctcctccaccaacccggggtcttactcacaacaaccccctcctcctatgcaatcttatccttcccaacaacaacaatcgagcggggggaagaagggcgggttcttgagtaatatcaagaacaagatcaaggaggctcagacgggaggtacacctattaagtcgtcggcagcgtcagatgtgtataagatacaggcatcaatccattcatgccatccatccatccatcagttcgatcaaggcaactttggccatcaatcaatcatttcaatcaatatcgtcgtggtcgaggttggacatacgaccaacaccggacgtcatcgctcgttttatcgcagttctcttctttctctctctccgggtcgactggtccgacacctgggaaacgctctcttttcccctcttctctgtctctcctcctcatctcgcccagacaccacgacgtcgtctctccgtgttcgacaaaggaaccccttttcagactcaaaccccgacctatctgggcaagaggtctcgatctgaacgcggcactcctgctccgcacgtcaagtcggactcttcgttgcaggactcgttgataccagtcggatcggacgtgcccgtgaaagacaggtcgcacatctctcgatcgagaaacaggacgtcgctctgctcgatcgatatctctacgctttgccgacacctcaaacgatcgagcgtgaaggtcgcgtcaagctagtcatctcctgaatacgtcgcctcgagattgagattcctcagtaatcgcattcaatacaagcagacctgtcacccgggacggatatcaacaaagcccgtctcccgccttctcggtaaacaactcgaccacgacaggtacaataacaagacggccagtctagaccataacctgctacacgcccggctcgtcaaatctcccaccaccacccgcatctaacattcccgccagaatatcgttgatgatggcacgcggttcttcggtacgcgggttatcgtccgtcaccaccgccacgtcagcaaactcttcggcaattgcgcccatcagtggacgcttacctttatcgcgatcgccaccacagccaaagacacaccacagcttgcccgcacagtgcagacgcgccgcctgtaaggctttttccagtgcatccggcgtatgcgcgtaatccaccaccaccgtcggtttgcctggcgcagtgaacacttccatacgtccgcaaaccggttgcagacgcgcggcggttttcagcagatcagccagtggatagccgagtgccaacagtgtcgccagcgcgagcagcaggttgctgacgttaaaagcgcccatcagatggctttcaatttcgccatcgccccaacttgagctaaagcgaatcgtcgcaccgctgtcgtgatagttcacttcggtcgctttcaaccagcgtccgtgacagttcggattaatatgatcttccattgataccgcaaccgcgtccggcagttttgccagccagcggcggcccacttcatcgtcggcgttaataatcgcctgaccgcaatgatgctcagaataaagcagccatttcgcggcttcgtagtgttccatatcaccatgataatcaaggtgatcgcggcttaagttggtaaagaccgacgccgcaaatttcaatgccgccacacggtgctgtaccagcccgtgggaggaaacttccattgcgctccatgaataggatcaaaccttattccatggtatttacatgaggttcctctttaagaaagtccccgagagggcttagttgatccatgatttatgtttcatctttcgtttccttttcgtttgtttcgagaaatctatcgatcaattccgattctttctttttctcttgattcttttccgatcgagatgtatagatcctgttcatggattaacgaaaatgtgcaaaagctctatttgcctctgccattctatgagtctcttcctttttgcgtatggcatcgccactccctttggcagcatccactaattcggaacttaatttgaaagccatatttcgacccggacgttttcgggatgccgctaataaccaacgaatggcaagtgcttttccttgtgtggatcctatttcaatgggaacttgatgagtcgatccacctacacgtcttgcttttactgttatatcgggagttactccacgtattgcttgacgtaaaacggatagtggatttgtttctgtcttttgttgaatctttttcacggctcgatagataatttgataagccaatgatttttttccgtgtttcagaatacggttaaccaacatgttaactaatcgattacgataaattggatcggattttgctgtttttttttctgcagtacctcgacgtgacatgagcgtgaaaggggttcaagaatcagttttctttttataagggctaaaatcacttattttggcttttttaccccatattgtagggcatataatgcctcataaggggccatctgaatgctggaatggtaactattgttgtaggcgaactcaataagaggaaggtgatcatcccaactacccttgaagtcgatcacacaagctctcaacatgtcctctaaggtatgaatggtacgctctgcctgaccatccgtctgtggatgaaatactgtgctaagattaacctgagtaccaagacccttctgaaatgacttccagaaattagaggtaaactgaggacctctatctgagatgatagaaaaaggaactccatgcaacctcacaatctcattaatgtaaagcttcgcgtaatcctctgccgaatctgtagtcttgaccgccataaagagagaagacttagtaactctatcaacaatcacccaaatggagtcatgttgtctgcgagtacgaggtaaccctgtgatgaaatccatgtttatcacttcccacttccaattaggaatttcgatatcttaagtcatacccactggtttctgatgttctaccttcccttgcggacaattagggtacttagccacaaaatctgttatatccttcttcatgccattccaccaaaagacttaccacggatcactgtacatcttagtggcacctggatgaatataatacctggagttatgggcttctgtaagaatttactgtctcaactcacccacattaggaacacatagttgaccctgatagtgaagcacatcatctcccccttgggagaatacctctactgtaaagatgcgactgtgatcactcatttgcgaccacaatcacatcttgcaactcctgtcacactattgcaactcctgttacactactgcaactcagccacagaactgcgactgtggacactcatttgcaactcagtcacatatttgtgactactctagtcacaactcttgtacacacaccactagccctttggtgtatatataggagtccccagaaggaggaaaggcatcccttttctcttctcttatgggaactcagactccttgacaccagattcaatactcttaccttcatccccttcttcacctttaacattcgactttcctcaacaaggcttagctacccttgttgcctattcaacaaagacatcaagaaccttagccttggtgttgagacaactgcaagacagacatcattagctgtaagagcaccttttctctctctgggatctggtattgttacaaaatctgttaccgttcaggtcaataggtggtatcatgtgacgaccaggtagaacttcaagtgaaggtatactagtttcgcgtggtttcctaatcagagctctcaaggcggaaccactggtgacaggtggccgataatcgttccctagtaatgggatccaggagaatgacgatttgtcaatcattattcgtacaaagtagaaaggggaatagtcgttcgttgcccaaaggccaatcgaatcgtgatttgtcttccgttataagtccttgtcggtagctcatcgcccaagctgtaaataaaaaaggcgacccgtgagtggtcgcctttttgttgcccggtggcgctagcgcttaccgggcctacggtcctgtaggccggataagcgaagcgccatccggcaagaccttatttactgctgctgtgaagactggatcgcggtcaatgcgatggtgtagacgatatcgtctaccagcgcgccacgggacaggtcgttcacaggtttgcgcataccctgcagcattggcccgatggagatcaggtcggcagaacgctgtaccgctttgtaggtggtgttaccggtgttcagatccgggaagatgaacacggtagcgcgacccgcaaccggagagttaggcgctttggatttcgcaacatcagccattacggcggcatcgtactgcagcgggccgtcgatcatcagatcaggacgtttttcctgtgcaatacgggtcgcttcacgcactttctctacatcgctacctgcaccagaggtgccggtggagtaggagagcatcgcgacgcgcggttcgataccgaaggcaatcgcggagtccgcagactgaatcgcgatctcagccagctgctctgcagttggatccgggttgatcgcacagtcgccgtaaacgtaaacctgttcaggcagcaacatgaagaacacggaggaaaccagagagctgcctggagccgttttgatcagctgcagcggtggacgaatggtattcgcggtagtgtgaaccgcaccggacaccaggcccggcgcgcctcggatgccgcgcgctcggcctcgcggcggcgcttctcggcctcgcggcgcgcgcgtcgctcggccaggtcgtcccgagcaggcgccgatggttcgacggccccgggcaccgaacccgccacgcgctcggcgaggtcctccgggcccaccgcccccggatcgagggggcggatcagccgcccggcggcgaccacggctcccgcgaccgggtcgacgatcgcggcattgaccgtgcgctcgacctcgtccctcgccccggcggccagagcgacgtcgacctgccgcgccagatccgccgcgcggcgcgcgagggcggcgacgagcgcgcgccgctgcttgccgaggcgcgcgagctcggcggcatccaggtcatcctgcgcctctcggagcgcaccggacagttccagcgcctcacggaacgcggcgtcgtggctcagcaggttgacagcccacgcggcgaccgtgggcttccgcagaccccggatgctgcgggccagcgctccggtctcggcggcggcgcggtcgttgcgcgcacgcgtgaactccgcgggcggaaggatcagaagctcggcggcggcggcgtcgaacgccgcgacatcgagcccgctcgccccgtcagcacccatcccgccattctcaccgacgcggcttgcgcgcgcgaggcatgagctcgccgtcgacgacgtcgaacgcgggcaggtcggcgaacagctgctcctcgaccgatccgccgtcgcctatggacgaatatgcaagcatacgtttcatgcttgtttgagtaatagcaatgagatttcccaatatcatgctaagaatagctaggatttccagaagaagatgccattcgtttgatgagaaataaaaaggaatatcgaaaattcgagtggctgaagctgaagcagctactttcgaagtaacagaaagaaaagcaacgactggagtgggagagtcagagtcgaaaagaggattcctcacttctttctctcattcaaaaccgtgcatgagactttcatctcacacggctcctaagtgataaaagaaagaagaacccattttctttcttttttgattaccttcctcgcgtatgtataagaccgaatccattcgatttctaaaaaggattactaatccttaacttttcgaggaatccttcatcagtggttgtgaatgactgatttttgcaatcttttcgaccttggtttcgtaggagcaagtcagaaagattgagaaatagaaccatctgatttcattcgttctcaatagccacgagatgatcatcttagggtgatccttttgtcgacggatgctcttattacactcgtagtctctgaaggatgagaaccaactatgtagcatctacatcgagaattcaagtattgtatacgtcattagtccgatcctttgtaggaactacccgtaataacgaacttgcaaaatggatctgtttatcataaagagattcgtcgttcctgacactcatgtgtatttaaaggtacaaacccatgtctgggcttggttttaaaaatcctatctaagattccttgtggaacagagttccatcaaagtcaatcaaaaaggcctgtatagaggtaattattcttgctgcactttatgcaaataatcaggccaagtataagactaaagtttattttgcaaacagctcagtcctatcataagttgtttttaacttatcataagttgtttatgactggagagggagaaattattatttttgttgttgttgtttgtttgtttgagatggagtctcgctctgtcgcccaggctggagtgcagtggcacatctcggctcactgcaagctctgcctcccaggttcacgccattctcctgcctcagcctcccgagtagctgggattacaggcgcccgccaccacgcccagctaatttttttgtatttttagtagagacggggtttcactgtgttagccaggacggtcttgatctcctcacctcgtgatccacccgcctcagccccccaaagtgctgggattacaggcgtgagccaccgcacctgggcacgttctcgttttagcataaggaatttggtaggggctctgctgccccaacaccattaccagaccataggacatgacctatcttcataaggtccatttgttcacttacagacaccttcctagatggtttcagcactgggctcacagtatcatctctacctgtccatcttcacactgcatacactgcagaacgtcagccggaacgcgacatcactccggttaacgatgaaaccatgcaggagattaacactctgctgatcgccctggataaaacatgggatgacgacttattgccgctctgttcccagatatttcgccgcgacattcgtgcatcgtcagaactgacacaggccgaagcagtaaaagctcttggattcctgaaacagaaagccgcagagcagaaggtggcagcatgacaccggacattatcctgcagcgtaccgggatcgatgtgagagctgtcgaacagggggaagatgcgtggcacaaattacggctcggcgtcatcaccgcttcagaagttcacaacgtgatagcaaaaccccgctccggaaagaagtggcctgacatgaaaatgtcctacttccacaccctgcttgctgaggtttgcaccggtgtggctccggaagttaacgctaaagcactggcctggggaaaacagtacgagaacgacgccagaaccctgtttgaatttacttccggcgtgaatgttactgaatccccgatcatctatcgcgacgaaagtatgcgtaccgcctgctctcccgatggtttatgcagtgacggcaacggccttgaactgaaatgcccgtttacctcccgggatttcatgaagttccggctcggtggtttcgaggccataaagtcagcttacatggcccaggtgcagtacagcatgtgggtcatccagcagtggagaatattagtcaatgatcgaaagattgaactagtcatctagaagagtgaaacttttagttatagctccttaaattaagaaaacttgattcttaattttatgtaattcttgccaatttccgtgccagcagcagcggttatacggatagaataagcgtttaacataataaaaaggcctaaaaagtatgtagatggaaaaaaacaaatctttttctagagtaataaagatgtttgtagtattgtcaaataagggatcaaatccgacaatcttgatgagactgcttaagtaaaaactacttacaattaattactgacattgagatacgaaggcttagatcgcgaaagagattagatacctctgtagtctaagctgtaaacgattattgctctcccaatctttttgattgggtttagtgaagacggtaagcaatatgcctggggagtactttcgcaagattgaaacccaaaacattagacggtcttggaaatccgcagtgaatcatgttatttaattagataatccgctaaaaatcttacctttccttaaaacaattagttctaattgttgggtattgcatggctgtctttagttaatgtcgtaagatgaggttaattcccattaattaacgaaagccttcaaagaatttgtttttctttgtgttagtgataagctaactttttagagggttaagacaagtcaatatgatccgcgcttagaagtctaagtttgcataaactgcattatcttctataaattgtctacggttttctacaacgtcacccattaacatttcaaatgtttggtccgcttcaatcgcatcttcaagttttacttgtaaaagagcgcggtgctcagggttcattgttgtttcccataattgatctgcattcatttctccaagacctttgtatcgtgcaatagaccattttggtgttggattcaattcagatttaagtttatcaagttccctatcattgtatacataatacttttgtttaccttgtgtcagtttatacaacggtggctgtgcaatatacacatagcctgcttcaattaacggtctcataaagcgatagaagaatgtgagtaatagcgttctgatatgcgcaccatcaacgtccgcatcagtcatgattacgattttatgatagcgtgcttttgaaatatcaaattctccaccaatacctgtaccaaaagcagtgatcatttggcgaatttcattgttatttaggatacggtctaaacgtgctttttccacgttcagaattttacctcttaacggtaaaatcgcttgagttcttgaatcacgacctgattttgtagaccccccggcagagtcaccctctactaagaaaatctcactctcttcaggatttttactagaacaatctgctaatttaccaggtaaacttgatacatctaatgcgtataagagacagtaactagactgagctaaacttttgagaagttcctatcttatatgtttctaatgtggacacattagaagattgttaggagaaggttcttgggagatttggagggtaaatggaaggtagcaaccattttctctctctctctcgtgttcccgcgcctttacgttcgcgcgtgctcccgcttccgtccccgtcgcacccacccaacccagcaacgagccaaggggaaaccatctctccgcctgcccgtcaagtcgacgctcgaacaagctctgaccaatcatcgtcaagcaaaccaacagcaaagccaaagtaaagcccccgcgttttacacctcgtccacctcggacatcggtatcccgttcggttcggttcgccgttcgtttcgaatcacttcgtttagagcaggagggggtcgaaagcgagatcagaccagccccccacccaaatctgctccgaaccgaattgaacaggcctgacccgagttagtatgtatagcctcggcagcgcgatccgatccgtcggggcgatactctagagtagtggcggaggatgacgactcggaggaagcatctcgcgcttaggagtaagaagtgcgataggtgctcaagagttcgattctctttattcgtataaatatcattgaatcatattgtgctatagtagtctataggggccgggatgtcgcccggtgattcggggggggccccaaagccttaccaaccagtaggcctatacctttttttatgtaggatatttcctgttttatatccactccccctcagcttcatgctcacccctcttcttctgagctaatgtgcccgctttatttgcacttgcatggaatatgatcatgaacacagtttttattattgatgaccacccggttatacggcttgcgattcgaatgttgctagaacacgaaggctacaaagtggtgggtgaaacggataacggatgcgacgccatacaaatggtccgcgaatgtctgcctgatctcatcattctggatatcagtattccgaaattggatggactcgaagtgctatgccgtttcaatgcgatgaatacgccgatgaaaacactgatactgacagcccagtccccaaccctgttcgccacacgttgcatgcgctcgggtgccgatggctacgtgtgcaaggaaggtgacctgagcgagctgctcagcgccattcgtgcggtgctgtccggctacaactacttccccagccaggccttgagtgcggggggtgtcgacggcgtcgaagcccaggaacttgaactgttcaagagcgtcaacgacagggaactaatggtcttgcaactttttgcacaaggtcgcaccaataaggaaattgccaaaggcatgttcctcagtaacaaaaccgtcagcacttataaaaagaggctcatgcaaaacaattatagctttcatacctgtttgtttctttttatttccttttttttatcatcttccagataaagaacgaacaagagtaaaaacgaagttgattcaaataaagatttctctggtaccctatgtcaataaaagtaaaagaaagaaaataagggcgaaagaaagataccaaagcaatgttgtatcaggctgcctgtctttttgtagttggatctccaagtttttggaatgctccaaattcgacttgagcatctaaatctgggtcaataccagcaaaaacatctctgaacaaggttctagcaccatgccaaatgtgtccgaagaagaagagcaaagcaaacgaagcatgcccaaaagtaaaccaaccccttggactgctacgaaaaacaccatcggatttcaaagtagcacgatctaattcgaaaatttcacccaattgagcacgtctagcatattttttcacagtagcaggatcactataactgacgccgttgagttcaccgccgtagaactcaacagttacacctacttgttcaacactatacttcgattctgcccttctaaaaggaacatcggctctaacaattccatcgccgtctaccaaaacgaccggaaatgtttcaaaaaaagtaggcatacgacgtacaaaaagttcacgcccttccttatctctaaagatagggtgtcctaaccatccaaccgctattccatcctctctgtggtgatcgcgagaattgaacacatagaaagcccaatccagtcggataggcatcttttaaaatttcaactgccacaagtcctgaagaacgatggcaatacattcaaatatcatcacatgctgttttgctccagtatcgtcttttttatcgcatccaagaccatggctgccaacttcatttctattggatttttgaccatcaatgttgggggtattgtcttttcactggcctaccttgctgcagatatgatgacggacgtttatggaattgagcgcaccaaacagatggtgctatttgttattttttgcaatctactgtttgtttttgatgtttgggtaaccaatatgctggcgattggagagaacgaaccgtaccgagcgatacttcacaatcaggcgcgaatgttcatcgcttctgccaccgccttctttctgggtatgaccatcaattccaccgttatttcactcatcaaatccagacagcgcaaacggggtatttccctgaaaaaagaatttatcaccaccgtttggactcgaatcgccacctcatcggcatttggaatcatcatcgatgtgagcttgttttcattggtggcattctatgggattgttccaactgaaaaactggctagcgtcattgtttttgaggatgcctataaaatctcgtatgccgtcttctgcttgaaaaaaaaaagaaaccccccccgccgaacccgcccggggagtggcgtctattacacatcgtctggcttggcgaccttgcgtttctcccgttcctccgtgatcgtgtcctgcatctcttgccacgagacgggtaccaacgggttgcctgtcgaacgtcgtcgtcgtcgttgtcgaagcgtcaagcgggaagatgtacagagccagtgaccaggacgcaggatgagcctcgagctcgatctcaatatcctctcctcgtccgatgcgaacggcgagacgggaaaaaggcaagcctagctgaaactcaccggaagccgaggtcgccgagatgacgcccaggtgattagcggccgtcgagaggaaataagatcgagcgtcaccaagcgagagctacgaggtcaaatatgtatcgtcgaatcagccttggtcgtcggaggtcgactctggatcttgctccacttcggtttccagcaccacggccacggccacgacccatctcatcgcgatgtacgaggaggaccccccgccatcccggcgcgttcacgagactcaccacttctgctctgacgacgtcccctagcctgaaacaatcccccatcctcagtttatccttttccgtcaacctgacgtccgagagcttgatcaccccttggaaatcttcctgggattgcggggtggggcgggaagagacgagtgagatggtcaaggtggctaggagaacccaaccaggcgcacatcgagcgcctgcgggtcggcatgtcggtggaagccagcgtcgacacctcgccggccgcgcagcagcgcgaggtggcccagcaatgaagcgagttgtctggctcaccttgagcctcatcagcctgagcgcctgcacggtcgggccggacttccacgcgccccagagtcagcaagtggcccaatggagcgcgccccagggccgcctggccgccagccgtgcggtcagcgacccattgcaggaacgctggtgggacgtgtttcacgacgcgcaactctcggcgcttacacgccgcgcgctcaccgataacctcgacctgaaactcgccagcagccgcctgcaacaaagccgcgccgtgcgccaggtaaccaccgccgaacgttatccgaacgtcaatgccaccggtgatttcctgcgccaacgcaacagcggcaaaggcttgagcgacccgtccggcaacaatggccgttcggcattcagccagtgggacatgggcttctcggcctcctgggagctggacttctggggccgcgtcaaacgcgaaaccgaagccgccgacgccaccctgcaagtcgccgaaaacgaccgccgtgccgtgctgttatcggtactcgccgagaccgcccaggactatatccaactgcgcggcgtacagaacacccgcgccgtcaccgagggaggatcttcctcgccaaagtgaacccattcatgtgagtaccacaaactccggcgtgtatccgttccagaagccttgtagcttcattagcatcaacgcatctgagaagacctaaatctggagtcctcctgtaaaagatatctccatttgcaaagaaattgagggccttacggcgtatcgacttcttctggttgaatgttgcattctcaggataagtcccagtctctaaatacctcttgttgtcaaaataccaaggtaaaccatctggttccgcttcaacatgcgaacagtggacaggctgctcgtttatctctatatccactggatcaatataacttgtatctggatgtttaatcattgaggcaatggtggcaagagcatcagccaactcattctgcgtcctggagtatgtctgaactcaatcttgcgaaatctcttgcacaacttctgtatatactgcacgtatggtgttatctttggattcttcacagcccattcaccttgaacctgatgaatcagcaaatctgaatctccaataaccaacagctcgtgaacgttcatatcaattgccatcttcagaccgaggatgcaagcttcatactctgccatgttgtttgtgcaatcaaatcggagtttagccgctataggatagtgctgaccagattctgacactaagactgctccgatacgggtttcggatggcggtcaagcgaaaggtgtgcgtgtcgtatagggggccgtaaatcgagcaggacggaaggggggatggacggggtctagccgaaccacctgatcccctcatctccgtctccgcgcctcggtctctccctgtccttgtcccgccttcttccctgtccacttgtccaactgctctccctcggcctcgctcccttcgtacccggaatcgctgtcagcaccatcgaggacgaccgtcacccgttcgtccgccgacgtggccgacgccacggcttcgcgctgttggtccttttccgcgagcttgcgttttcgttccatgttcttgatcgcatcgtgaatgggatcgaggtcgggtcgaggcggacggtaagaacctccccacgagtcggcccaggtaaagtactgcgaacggcgacgcacggtgcgaattagctcggggcgtcccttttgatacggcctcgtgcagtcccgatcctgactcacttgaccatagttgcaggtaaagtacatgtggtgcaacgtgtggtgggcgggcgagttgatgtacttttccaacagatgccccgagatcatatccccatcatgaatctgtcgtttccaggtaaatacaacaacgactcgtcgatcagccgacacgttcaccgacggaaggggggcatccgaggagacctcgaggaggagacagccaccgcctcgaccggcaccatcgaaagcgcctggagcgccaccccgacctcctcgtccgccaccgccctgtcgagtattgacagagacgtcggaagagaccgagtcgaagaaggacttggacttgttgtagacgggagcgacttgctcctgctcgtctccctgaagacctgaaccggtggtagggccctttttgcccatgacgacctcttcatcggaatcgtcatccgagtcctcctccgtagtctgactatcgaccccgcccttgctggaactgaggacaacctctgcctgaccctgtccacccgacttttgttccctggtgcgcatctcttcgaatttacggttcatctgctcgaaatcgtattcctcggcgggaatgacgggaggggcgggtcccggtccgcctagtcgatgaccctgaccgggtcctcctgggaaagaaccgcgaccacgaccgcctcggaagccgccgccgccgccaccctgacgaggctgagactggtaggacggctgggaaggtccaccgtggttgcggatctcgcctacggtctgctcgatcttttcgatcgtgctgagaggagcctggttgtacgaaccttggtgaggagggggaggcgaggtgtaggcaacctgatgaggggggggtggtggtggtggtggtcgccgtgaccagagcgtcaaggcactcgtgggttctgcggattacttatccacaagcatccacggccaggtcaacggcgtactgtcacggcgctcaccgggctcgacgctcaagccgttcctttacgggctggcgctggaccaaggggtgatccaccccatgagcatcctcaaggacttgccgagtaacttcggctactttcagccggaaaatttcgacggcagttttgtcggccctctcacagcgcgggatgcgttgatccgtagtcgtaatatcccggccgtgtggttggccagccaggtgaagtcgccgtcgttgtatggcctgctgcaacgcgccggtatcaaaggcctgcgtgacgagagccattacggcctggccctggccctgggcggcggcgagatgacacccgaggaactggcgcgactgtatgtgatgctggccggcgacgggcatctacggccattgcgctatgtgcaggagcagccgcaatccactggggcgcaactgctcacgccccaggcggcctttatggtgcgcgacatgctgcgtcgcaacccgcgcccggatggcttgccgggccgccattggcgcaccgcgtggaagaccggcacctcgtggggtttccacgatgcctggagtgcaggcctggtgggcccctacggatccgttaaatttttgatgcctttctccagtaaattttatttttttggataagtgaactattacgtactccttagataatggctgtttccaagcccatattcttattgaataaggagtaagactatctttaaatcacttaacttaaattggggaactttaaatctttgatctgagctgtttctcttttgactattgaccttatcgccaattgtctaactacttcaaacttttttaaatttattccgagattaattaacgccttaggtaaatctttagatcccctattaacaagaaaaaacttcttgaaggcaataaatttctgtacctcatttagtttttgaagtgcccatcttaaaatggtttcgtggacaaccagctatcacctaactcgattagcatttcaccccttaccacaaatcatccaaaatctttgcaacgattactggttcgatccttaaaatctgttcatggtaagatcgtcaggtttcgggtctttaattatttactttatggcctttcagcttgcaaataattaaaacttgctgacccattatgcaaaaggtacaagataataatttatttaaaattcactatcttcgcttatagattaactatttcattgctttcccttacggtactcttcactatcactcagttaatactgctgccgttggccatgctgttggtgttcagtcggccatggtatttcagcttgttaccgggtttggtctgcgtggctgccaaccaatggcaggttttgctcaataacggcagcctcgttgcgctgctcgggctgggcgcttgcctgatcgcgccattggccggtttggtcttgttgcgacaggccaaaaacgtctcgcctccggccatgcgccgttgggcgtatgccctgtacccactgcatttcctgatgttgctactcgtgcgcaagatcatcgcctaacccttgtgggagcgggcttgcccgcgaaggcggtgtgtcagcaggcaagtgtgcaagctcatccaccgccttcgcgagcaagcccgctcccacaggtttttgtgtatatctggagaaccgatggccaacgccttgcccgacctgaaactcctgcgcatcttcgtcagcgtcgtgcggcaccaggggtttgccaatgcccagcacgagctcaacctgtcgacgtcggccatcagcacttacatgagccaactggagtcggcgctgggcctggtgctgtgccatcgcggtcggggtgggttcagcctcaccagcaagggcgagttgttccatcaggaaaccttacggctgctgggcgaactggaaggcttcgagcaatactctgcacatcgtccacattcgcgcccgtcaggccttcaaattgtgggtcgaagtaacccaggtactgcttgagctgggttggcgtatcgcgatgcggatcgacgctcaccaggatcacctgcaacttatccacaacgtccttgggcagctcgctcttgatctggcgcagttgggcgagggtggtagggcaaatgtccgggcagaaggtgtagccaaagaacagcaggctccacttgcccttcaactcgttgaccaccacgggctggccgtcctggtttgtcatggtcaccggcggcagttggcgactttgcggcagcaggatgatgccagcgtcgatcaacgcagtggggtcaccctggcctttgccactgagtactttgttgacggtcaggcccatgatcaacgcgacgatggccaccaggataaagacggttttttgagttcgggtcataggttcaacaataggtagtggtctacgagcagggcgataaacagcaacagcaggtaccagatagagtacttgaaggtgttgatcgccgcgtgcggctgagcgccacggtacaacacccaggcccattgcagaaagcgcgcgcccaataccagtgcacacgccaggtagagcaggccgctcatgtggatgacatacggcatcaggcgctccgccccagcagccgacgctgcggtcgcgcccgcaccggtcgaggcgctcgccgaccggtgacctgacgcggcccggtcagagccaggacgacgcggcgcccgcggcggctccgagcaggacgaccgcccaggccgggcagcgccagagagtgagcagcccgaagcagacgagagcgagcgcgaactggtcgacccgggtgaccgaggtcgtgaagacggggtcgtagagggcggcgccgaggatgccgaccacggcggcgctcgcgccccgcactgctcccgtcgcgcgcggccggcggcggatcgcggcccagagggggagggcgccgagcaggagcaggaacccgggcaggaagatgcccgcgagcgcgatggccgcccccgcgccgcccccgggcccgacctcggagagagcgccgaggtacgcggcgaacgcgaacagcggtcccggcagcgcctgcgcggcgccgtacccggccaggaaggtctgggcgtcgacccaccccggcccgacgacggaactgtcgagcagcggaagcaccacatgacccccgccgaagacgagagcgcccgagcggaggaacgcatcgaagagcgccaccgcctcgctgcccgatgaactgccgacggcggggatgcgggtcggggtcgtccaacaggtcgccgtgggtcgactcagcgtcagccaccagtggcgacaggctgttggtcagtttcttgatgcgagcatccagaacagcctgggcatccggcagacggacttcggcaactttctgaccggtcacacgctcgatcacttgcagcatgcggcgctcacgtggagtcaccagcaacagtgcacgaccttcgcgaccggcacggccggtacggccgatacggtgaacgtaggactctggatcgtaaggcatgtcaacgttgaacacgtgggtgatacgtggaacgtcaaggccacgagcagcaacgtcggtcgctacaacgatgtccagacggccatccttgagggagtcgatcacgcgctcacgttggttctgggcgatgtcaccgttcagcgcagcggctttgtagcctttggcttccagggcactggccaggtccagggtcgcttgcttggtgcgcacgaacatgatcagggcgtcgaagtcttcgacttccagcaggctcaatacagccgaggtcttctggtcagcgtgaaccaacaggtgagcctgttcgatcgcggtaacggtctgagtcttggtctggatcttgacgtgctctgggtcacgcaggtggcgctcggcaatggcacggatcgcaatagctcgcttgaacttttttaacacagtcaccaagcactctacttgtctcgcattcaaatctgccgaaatgatgactggcaaagtattcttttcgcccaagtatacatacctcaagtgcggtggtagagccttaagctccaatttcggtgcctccacaattgatggtcttgcgggtggggacttgcgattcttcatgtctaattcatgcttctttggtttggatcggtattcacacatgtcgagtgtggctatcaactcatcataatcttcaatgccattactatcgaaattcataatgactgctactagtgcctcaacacctagtcgctctacaatttgcacttctgacccagtctccgctctatatgttaaagcggatactgtttggagctcaccattctgcttcatggatctacagatattgaaagttgcttcttcattgttcaatctgaacttcatctgtctcttttccatatcaaccaacgcacgccctgtggcaagaaatggtctcccaaggatgatgggaacctcaaaatcaacctcacagtcaaggattacaaaatccgccagaaagatgaaagactctactttcactagcacatcatggagcacacctatgggcctcttcacagtccgatcatcggtgatgtccgaatgccttgttttatggggggttgcaccggttttgcatgcccttacagtgcgtaagggatggggtgggttgcccaataacacggcaatttttgtggtttttgttgagaatcgaacgcgataagatcgcgaacccttgcaataatggtgaaggattattgctgtaatcgataaaaattatttctttataagacatggtttatacatcgctagctaactacaatcgcccgcactgaatgtccggtgctgttcaatatttgagcactggagcggtcgaggggcagatggatggctctgtgcgaccccaaggttccggcagcctttcaactacccgcaccaaatggaattggtctgtaacaaggcctttaaccacgaaatcgaataagaactcaccgcaggtccgtgaaacgtacagttatggcgtgacgggcaggctcttattcaatcgaagagaaatgccaacccttggcagggtgaagtgttggcgatcaaaacccaactgcattgcgcaagctgctttagaggtcgtgagatgagtaaaaacaggtacccccgattactaggctttttgccgctgcttggcatgatgttaatgctgggaggctgcaagtggaccttgatggacccgaaagaaaccttcggtcaatttgtgattaacctgctgagttagtgtgtttaaatgattacgaatttcctcagttagtaattgtaagtgagaagtgagtgagctcgcatgatgtttgaagctatgagtcatttgctctctgacatcggccatttgtctttgtatggcatcactaatgagctgttgtgtagtcagttgtccttgagctatcttttcattaataaattgttggctcgtttgatatgattggcttaaatcaatatgtaactggtgaagttgagagataagtgtttgttgtattctttcaccaagttgttcggtcagttttttttgctgtgcttgttttatcaaaacccagaaaagcaataagaattgaagggcaatagccaacgctatgccctcaaacaaagtgacagaagaaaataatgccattcattaatccactaactgactaagcttgacaggttggttgtattgatacacagtttttaactgcccatagtctatcaagcgtaaataacccaaatagaggttatcgtccgataattgattgtgattgtcaaaggtaaattgcaaaacatgcttaccgggttcaagccactgcgctctttgcgaggtctgaataggcctggcttcaccctttccattttgtctgtatgcctccggttcgcagcaagactattggggcaataacgataaaaacaggaatatctctgttggggtttccggccagcaatggggagttggttacagcctgaattatcaatacagccgctacactgatcaaaataatgaccgcgcactctctttgaatctcagtattccgttagaacgctggttaccgcgtagccgggtttcctatcagatgaccagccagaaagatcgcccaacccaacatgaaatgcgtcttgatggctcactgctggatgatggtcgcctgagctatagcctggaacaaagtctggatgacgataacaaccataacagtagcctgaacgccagttaccgttcaccttatggcaccttcagtgccggatacagctacggtaatgacagcagccaatacaattacggcgttaccggcggcgtggttatccatcctcatggcgtgacgctctcgcaatatctgggcaacgcctttgcgcttatcgatgctaacggagcatctggcgtgaggatacaaaactatccggggattgctaccgatccctttggctatgcagtggttccttatctcacaacttatcaggaaaaccgtctctcggtagatactacgcagctgcccgctaacgcctgtcgccctttctcccgctcttctccttcgggagatgtccctctcgtcgtcgacccgtggccttcgtcattcgctgtcagtcagtcagtcagtcagtcctcccccccttggtacatagtcaagaaggctcgaccccgccgatatcatcccaatcacctcacctcacgtctttcaatctagcccttctttcttctcttcaacagtcgtaccgcttcatttcagaacccgtacgcaaacacaactcaggcaggccaaagaccttgtcctataatacattacagcgagaacacacccacacaagctttcaagcaacatgtcccactacggcggcaacaacgacgatgccatgtcgaggaccacctcgatttcgaggcgacagggttccaccatgtccaagaaccagtccttggtgagtgttcagactagtctggtctcatgtcctcgcggctcgcgagcgagtgagcattgaacagccgcgttttcaacgagagctgacgctgcggcccactttcgttcgtttgacaccccatagatcaagaagaacactgcaccccacgagctcaagccttcggacatcttgatcgaccgattcaccgcttggaagaacattgtcaagatgctcatctgtacgtgtccccccccccccccctcactgccattcgagcttgtctatcggcgacgaccggctgatcacacgtttcgacgagattagacttgctctttttggagatttcctccttgacgggagccaatgctcaacagcctttcctcttggcatcacagtcaatcttgttactgatggaatcaggcacactcgaccctgatgagagcgggacgggtgtttcgtttggcgagaggcaattgcgcgctgtcggctcgagctctcgactgagcctgggaagcgctttcggacggagacggaagaaggagagcgtgaatgtcaaggacatggtcggaaggggaggaaggtgttgttgatctcgggtcgcggggcggcgactgttctgactggctcataccacggacatacataatgatatcgtcgtcttgtatttttatatataataattcccttgtaggccgtgagcaatatatccatcctcttgtcttgcgacattgcaattgcaacggacagtcgtggatcatagagtgtatcacatgtgtagacctcgagagtcgagtagatggttcgcgtgagaaagttgtcgatgccgtcacttccttcctgttcctcatatgtgatgcgatgtggcgccccgccctttccgtcgcagtggcattgccttcacggccgccctgcaccaccaggtagccgtctttggcttccagcacgccttcgaacagcgaggtgttcggggtatggccgatggcgatgaacacgccgtcgactgtcagctcgtcgaagctgccgtcgttgtttttcaggcgggcaccggtcacgcccatgttgtcgcccaggacttcgtccagggtggcgttgagcttgaggatgatcttgccttcagcgacacgggcgtgcagcttgtcgatcaggatcttctcggcgcggaaggtctcgcggcggtgaaccagggtcacggtgctggcgatgttggccaggtacagcgcctcttccacggcagtgttgccgccaccgaccacagcgaccggcttgttgcggtagaagaaaccgtcgcaggtggcgcaggccgacacgccgcggcccatgaacagctcttccgacggcaggccgaggtactgggccgaggcgccggtggcgatgatcagcgaatcgcaggtgtattcaccggcatcgcccaccaggcggatcgggcgttcggtcagcttggcggtatggatgtgatcgaagatgatttcggtgttgaagcgttcggcatgctccaggaagcgctgcatcagttcgttatgccgcgatgagcgaccacacctttggcgcaccgaaaaacctgctgctggctggtgtggtactggccatcattatcctgctcaaccgtcagcgtaacccgtacctgcgcgtggcctcgctggtgatcgccatggcggccggttacctgctggcgtgggcgctgggcatgctgccggaaaacaccgcgccaaccaacagcgcgctgatcaccgttccaacgccactgtactacggcctgggcattgactggggtctgctgctgccgctgatgctggtctttatgatcacctccctggagaccatcggcgatatcaccgccacctccgacgtctctgagcagccagtgtccggcccgctgtacatgaagcgcctgaaaggcggcgtactggcgaacggcctgaactcgtttgtctccgccgtattcaataccttcccgaactcctgcttcgggcagaacaacggcgtgatccagctgaccggcgtggccagtcgctacgttgggtttgtggtggcactgatgctgatcgtccttggcctgttcccggcggtgagtggctttgtgcagcacattcctgagccagtgctgggcggtgcaacgctggtgatgttcggtaccattgcggcctcgggccagagaacgatgcagccttcccccgccagacacatgccgggaacccggcgctctacccgcaggtcaaaatggtctgccagatggaactgaccagccatctgctgacggctgcagccttcggcacgatgaagaacagcgaaaatgagcttgctgagcaacttatagaacaaaccggcgataacactctgacgttaatggataaaggttattactcactgggactgttaaatgcctggagcctggcgggagaacaccgccactggatgatacctctcagaaagggagcgcaatatgaagagctcagaaaactgggtaaaggcgatcatctggtgaagctgaaaaccagcccgcaggcacgaaaaaagtggccgggactgggaaatgaagtgacagcccgcctgctgaccgtgacgcgcaaaggaaaagtctgccatctgctgacgtcgatgacggacgccatgcgcttccccggaggagaaatggcggatctgtacagtcatcgctgggaaatcgaactgggatacagggagataaaacagacgatgcaactgagcaggctgacgctgagaagtaaaaagccggagcttgtggagcaagagctgtggggtgtcttactggcttataattttgaacccgcgtattttttcgatatctacgcaaccaaactaccgtaaggtggtttgagcgagccgatttctcaaaaaacgcatttcactcattctttgaatagtagaaataagatgagaaaggaaaaaggggattcaaacggccataactcgagtctcggacgtccgtttgatgcgattttttttttgaacctgcgtattttttcgatatctacgcagccaaaccaccgtgacactgtttgcacgggtcgattttcccgaaaacgccttttactgttttctcatacgagcgtaaatgtgatgaaaaaattaaaaggaaattcagttgaagcgggtgggtttttcaaatagatctcgaaaaaatacgaggattcaaaaaaaagattgcgtcaaacggacgttcgagccgaaagttaccaccatttgaaattcagcatcttaaagagcgaaggtggcttggaatttgtgaaacttcaaacggccataactcgggcttcggatgtccgtttcagtcgatttttttttcgaacctgcgtattttttcgatatctacgcaaccaaactgccttaaggcggtttgagcgagccgatttttcgaaaaacgccttttgctcattcttaggccgaatgaattaactgaaatcatcgaatggtctcgaatggaatcatcttcaaatggaatggaatggaatcatcgcatagaatcgaatggaattatcatcgaatggaatcgaatggaatcaacatcaaacggaaaaaaacggaattatcgaatggaatcgaagagaatcatcgaatggacccgaatggaatcatctaatggaatggaatggaataatccatggactcgaatgcaatcatcatcgaatggaatcgaatggaatcatcgaatggactcgaatggaataatcattgaacggaatcgaatggaatcatcatcggatggaaatgaaaggagtcatcatctaatggaattgcatggaatcatcataaaatggaatcgaatggaatcaacatcaaatggaatcaaatggaatcattgaacggaattgaatggaatcgtcattgaatgaattgaatggaatcatcgaatggtctcgattggaatcattatcaaatggaatcgaatggaatcaccgaatagaatcgaatggaattttcatcgaatggaatcgaatggaatcaacatcaaacgaaaaaaaacggaattatcgaatggaatcgaagacaatcaccgaatgaaccccgttgctcccgcctttgtggacttataacgaagttgatatttgagtgtgttatccccggcttttaagggcgtaagaggctggacctgattgagcgggatttcttgctgactttgcgcatcaagaatttgcacggcaatccccgttgccataccaccgcttccgcctgtgtcagttagtttgagcagtgcggcgtaagggtgtcagcctcgccgctaaaaaggacgtccgcgccagtaataccagcggcacaaccggtgatatcgatattcaaatcagcagcagtgcttacggtattcgcggcctgaaaatcactgatattaaaatcaccaatatgaatattttgtaatgcacttttggtggcgacatcacagccctgatcgaccacattcccataaatatgcatactaacttgttcaggcccagccatcccgacatggatgttaagaatgctaaagaacaagataacgcactgaaatatcgtttttttcttcatacgttcacgcgttaatcaaaatttattctcaccgttgccgtggcttcaaatcgcccggtttctggtggtacacctgtcgtgctgactggatagacattcattcgcgcgatactgtctgcatggttaaccaggtcaggatcaacatccagaatgcctttatttattgcatcctccaccagcgggcgcaggcgtttgatatccgtcgcggccttctgagtacggttcaataatttctcatagggggagatggcctgagagatattagccttgcgctgaatggcgcttttcaacgacgcgcgatactgtgctaacaacatacggtctgtgtgatggacgctaccccagcgggctttccagtctgcgttatcagctgctttggccattaccgcctgtttgaatttagctacctcggcggtggtcttttcaagttccgctttgcttcgctctaattcagcggtaagtacctccacatcctcgccagctgcgtgctgcgccttgatgtagttctgaaggtcgatagtagcctgttctttctggcgagcgcgttgcgcggctttcgccttatccatttgaacctgcatcattgccagacgttcgccatcatccttagcggtatacatctgcatttcgatcatctcgtatgccgtcttctgcttgaaaaaaaaaaagaataaataacgattatgcatggtatacaaacattggttgtacagacaaacacgaaaacacaacacaaagaacgccggccccgaagagctcaccgccgcggtgcgggtcgccgcagccggcgatgcgctgctggcccccgaggtcacgcggcgcgtgatcgagcggttcgcgggggcgggagaggagcccgcgccgacggcatccgcaccgtcggcacccgcaccggcacccgcggcgtcagcggcggatcacgggctcaccgagcgcgaggcggaggtgctgcggctgctcgcccgcgcgctgagcaacgcggagatcgcccgcgagctcttcatcggcgacgcgacggtgaagacgcacgtgtcgaacatcctcatcaagctcggcgcgcgcgaccgggtcgcagccgtcgtcttcgcgcaccgcaacggtctggcctgaccggccgcaccgctcgcgcgtcaggcggggtcggagacgggcgagcgcgacggacgcgtcgccggcacggccgggccgacctcgtcggcacggcgggtgcgagccacgcgccacagggcctgcacgctccagacgaacagcaccacgaggagcacgttgcgcgccaggagcagactcgcggcgaacgggtcggcgcgaacgagcggcatgtagaagatcgggaagacgagcgtggtcaggaagccgtctgctgtgctcacatccaggttatcaatggcatacagccctgagcccacgttgctgccattcaataccagggcataggtcacagagcctgccccgtcttcaccaaaatcaatggcctgggcaaaattatcagcaaaactggccgtcgcgttagcgcccaaattcgtttcatccaccgtcagcacatcggcagacagcaccttgctgccgtcaatgctcgggccgtcgtctttcacctggaacacgccctggctcacatccaaatcatggacagcctgatcgccgtcggcatccactaccgtggcccgaaccaccaaactgttggccagagcctgtaaagcggactggtcgtcggggttcgccgtattggcatgccataccgaagccagctgctcaaacaccacctcaccgctcgcctcatcaatggtaatcgtaaaataatccacgccgcccaggctgccggtcaccacattgccgttttggtttaatacaatctcaccgccccgcccgatgccgtcaccgtctgctgtgctcacatccaggttatcaatggcatacagccctgagcccacgagacttctctacaattcctatgcctaggtcagcgagcctggcgctggcctaccgccccgacaccctcgtcgaggtcttcgcgaccccggccgcggtggagcggcatccggaactgcgggcgtccgccgaagaagccggtctcgacatcgtgttcgcgagcgaggcggtgctcgcggcgatggccgacaccgtcacgccgcaggggatcatcgcggtcgcgcgacagtcgcccacctcggtgcgcgacgtcttcgctgggacgccgcgtctcatcgcgatctgcgaagagatccgcgaccccggcaacctcggcacgatcatccgagccgcggatgccgccggcgccgacgccatcgtcctgaccggacgcaccgtcgacccctacaacccgaaggtggtgcgctccaccaccggctcgctcttccacctgcccgtggccgtcggcgtggagctgacgaccgcgatcgaacgggcgcacgccgccggcatgcgcgtcgtcgcggccgacgtgaagggcgcggacttcctcgagcaccgcgccaccctggccgagccgacggcctggctcttcggcaacgaagcgcacggcctcgacgacgaggcgctgtcgcgggccgatctggcgttgcggctgccgatctacggtgccgcgggggcaagggcatgccgtaatggtttttgatggtggcgtcgattcatccccgggggaagactacacgcgagtcatcgacacacagtcatctacatcctcgagcgcaatggatgatgatggggccacaccaatgggaaatacatatcattataccacgaaacgacgaccaccgaccacaaactcgacctggacaacctcgaccccaacgaccgcaccgccctaccctaccctaccccgctgatgaatccgggttgaaccgtcggaccacctcggccaccgcagccttggcgctctgtgtggctgacctcgtccgcgtgtgcgaggccgtagtcaccaagggcggcaacgaggctctcgtcggacgtcctccttgcgtggattgcagctgctgttgctgttgctgctgctgttgctgctgcgacgaatacgccttgacggggtacgtgaacccaccgccagatggagtcgcagggacgctaggtgacatgacctgttgttgcccatgcccgcccgccgtcaaaccaaagtacgaagtctcctctgacccgacctgcaaagccggcgtcggcgcttgcgaatgtcctcttgttcccatcccacctcccctccctaggattgatgacttgtttgtccaaattcggggtgctagttattactcaatgtaaaaccacagattcggttatcataagctcagagtcagatatacccagcctatcttcattcctgcttatataatagctccaatagagcttgaggaattgaatgagcagtagaaagaccttttagataagggtttcatcacaccagtatttccccatggggtgcaccgatattgttcgtgaagaagaaagatggttctctcaagatgtgcattgactataggcagttgaacaaggtcacaatcaagaataagtatcccatcaccaggattgatgacttgtttgaccaacttcagggtgctagtcatttctcaaagatagacctcagatccgattatcatcagctcagagtcagagatagtgacatgccaaaaatagcctttagaactcggtctggtcattatgaatttgtagttatgtcatttggactaaccaatgctcatgcagctttcatggatttgatgaacagggtgttcaaatagtatttggacttgtttgtaatcgtcttaattaatgataaatgaggaagaacatgtgactcacttgagggttctaaagaagctgctgtactcaaagcaccttatgttaccgccaaacatggtctattgggtttatgcaaagtagttgccaaggaaggtggaactcataaggtaagagccaatgtcatttgcccggggtttgtccgtactcctctcgttgacaaacaaattccagagcaagcaaaagaattaggcatcagtgaagaagatgtcatcaagaaagtgatgctaaaagaaacagttgacggggaattcaccacaacagacgatgtagcacaaaccgctttattttttgcatcatttgaatcgaatgcgcttacaggacaatcattggtagtcagtcatggttggttcatggagtaaacaaccatgactcgaactaaaaaatctgcaagacagattgagtatcaacatattgcatgcagctttcagggaggaggggctttgggtgcctatcaagctggagtattgcatgctttaaatgaagtgggataccaccctcattggtacgtgggaacctcaattggagcaattaatgcagccattgctgcaggtaactctgacaaagaacggatagaaaaaatgtatcaattttgggagtctatcgctactcatcccatcccatcccatcacaatcaatccttcttccctcctaccccgaccaggtcgccatcaacggtcgaagacgtcgagatgcactcccgatcgagaaactcggggaatacgatcccatcccccggatccctagcacctctttgaccccaccggcttcttcttcccgattacaaccccgtccgacgttcaaccccgacctcgagtcacttcctatgaaggccctcttcgccaacggacccgtccctggcgtacagccggagaagaagatcgtctggaatacggagaggatcaaatggtggttggcaaacggggctcaaccttcagagaccgtcgtcaagttgttggaaaaggtgagtcgtcgaccttgccggatatacccccttcaccatcccctgtcaacccggtcctctcctgcgttcatcgcccctccccctcgttgcctcctcttggacccactcattcatccgcttaccctcacggcgtgcctacagggaggagtattgacggggaaccacaagtggaagatcgcctacaaacaacccaagcccaagtcgacgacaaaggccgaatagattgtatcacccggaacaccaccacatataatagacgcctgttggcattccagccttccttctcctttcagggcctatccgaaagagaatccagtacttcttggtcgtgaatatctgaactggttgtttgctgttcaagaattcttgtttaggcagttcataccatccatacatagtgttttgatctaagatttcaattcttccgtgtttcagcagtaacatattcttccatggagctaaggtccaaaatatggaagaaacaagcgtttccacgactctaccacccagtcaattctgttccacttaatccctcttccatggccacatatctttccggctaaggaatgggaaatctttctcctgttacatgaatccaattttcatttcatccgggaaaagccatctttttctcaacaatgtctttggcatttgatccaatagcgttccgttagataggaacagatttgataaatactgataactctcggatagagtattagaacggaaagatccattagataatgaactattggttctaagccatctctgacgattaatcaacaattcgaagtgcttttcttgcgtattcttgataaaccagcgtttatatatagatgtaggagatggcagcccggaagaattggctcacccttgaatttgaacgatcactgatctcctaagtgaggtctgtcagtagccgcttgaagatgtcatgtactcaacaaaaataagagcaagtccaatatcagtacacaaccacagtgtactggtaggatcatgcggctatcccactaagtgtaacataaataagtcaaacaacaatataatcacatgcatatatcgaacatatacaatatcatcaacgtgaggaacaacaacgcatttcacatttcccaagctacacaattatgacaaatcattggtcctctcatggaacccaaacccaaacagttagcataccaaaacgtggtacccgatccaatgtttatgtcggaacgtggcaaccgatcccataattatgctggaacgtggcaatcgatcccaattagttataccagaacgtggcaaccgatctattcaacacaccacaatcacaatcacaagtatcttctcaagttcataccaataagtcatgactcatgtcattcatcattcatctatcttatttacaacaagtgtgataaacaatgcaacattcacatacgtgcaagtatcataatcccctggtttaacgccgcgctcacgcagcagattcgccagcgccaccacctgctcgcgcatttcccgatagctgaacaggtaacgcgcatctgccagcgccggagcatccggtgtttttgccgcttgttctgccaccagcgcgctcagcgtggtttctggaatctcaacctgagtggcgttgatctgcgccagctgcgcatactcacctggcagcataatatcgacatcgccgcacaacagcgccggatccgcggcgaactgggcaatcagcattttcaggcgttcagcatgctggattaacgttggctcatcgtaacgctgtttattggcgaggatctcaatactcaaatcaccgtgtacatccgggaacagggccagttcaaggtcattaaccggaccggttgccagggtatgggtttgcgcctgaacaccaggaatatccagttggtaatcaaataccttaatattgagtaccggaccaaacagcggttcatcacctgccgctcgcccgctgtcacggacaatttgttcggcatcgtaacgttgatggcgacgcatttttttcagttgagccgccagtcgggttgccagttccgttgtgccactgcgcgtacgctggatgcggcgcagccgggcgcgccggtggtgtacgcgggtacgcggctggatttgtatgcgataaatggtggctgctgcgccaaggaccgttttggcgccgaggccccgagttatccccatgtggacctgccggccagtgcattgctcgacacgctgctgttgccgttgtcggtgttgacggtgcttggggtcgggtttaacgcgacgggtgggctgtagcgacggtgttgtctgggctggcctcatcgcaggcaagccagctcccacatttgatcgggttcacacaggtcaaatgtgggagccgggcttgcccgcgatggggccctctcgatcactgaaaatctatttgccgagcttacgcaactcgtccgactccaccacccgcaccccatcttgctcttccagcgccaggcgccacatggctcgggccagttcgcacacttcaatgccacggtacttgccgggaatcagtttcgacagtggcccggccagttgttcggcgaggcgcggttccagccgttcgccgagcagcagggaaggtcgaacgatggtcagttgcggccagtcctgagcgtctgataccaagactgcgtgaagaacctcagatacgtcgatctaaaccgataccagcctacgtatgcaggcagctctacatcaaaagaaaggctaacgccgtcgcttcgcatccgattgcgggggttcgcggttccgtgtctttacgaaggccctcggatacatgatgaatcgccccggatcctctagacaccttgcaagctccttacgtaacgcttttcaaactctaccggcgacagctgattgttgaaaccatgacgacgttttgcgttgtagaacatctcgatgtaatcgaacacatcactacgtgcatcttcccgtgtggtgtagattttccgcttgatccgttcccgtttcagaagctggaaaaagctctcggccacggcgttgtcatgacagttgcctcggcgactcatgctggcaaccaaattgtttgccttcaaaaagctgcgccaatcggagctgctgtactggctgccttggtcggaatgaaccatcacctcttgcttcggtttacgtctccaaaccgccatcaacaacgcatcaatagccaaatcactggtcatctgcgacttcattgaccagccaacgaccgtaacaggataatcacgtccaggcggagtattatcaggaacaccatcgtaaactgcgactacctcaccatccgcaaccgagtaaacattggccccataactgtaatagttttcatttttgttgggattttctttatagacatgaccatcagctccaaattgcatgaaatcaatggcgtatcgttcgggataatacacaatgccatgggctgcaacccttgcgcggcggtgtatggaatgattggatggaccattaattgccatccaatgctttccatccaaaggattggcaatcaccaggggcttagtaatttttacataagcgggagcagccagaaaagaatacctgacaccctcttcggatattttagttttcgatgaatatagatgaaaccgatgcattattttttcagggatttcatcaagactatcgaatttcaccataaaaaataacaaaccacgctcacccggtcttaatgtcaagtctgatgttaaatgattagaatgaccactaaaagaatatatcatctttcgcagctcttcctggttataggaaaaaagaactttataaggttttcggccatttaatacgtacttcacttagcaggttatccgacagtggctggctggcgatatttgccggcaggccagtgcccagcagcagggtcaggctgttctcgtcctgggcgacctggcgggtgtagcgcgccagggcaacccgggcgttttccaccgaggtacgcgcctggctgaggtcgagggccgaggccacgcccacttcgttgctgcgcgaggtcagcttgtagctctgctcgtaggcacccagggtgtcctgggtgagcttgagcagctctttgtcggcctgccaggtcaggtaggcgttggccacgctggccaccaggctgatctgggtactgcggcgtgcttcttcagtggcgaagtacttttgcagggcttcttcactcaagctgcgtacgcgaccgaacaggtccagctcatacgagctgataccaaggccagccgaatattggctggtgatggtcgattcgccggtctgcgacagcttggccggagtacgcgaacgactgccgctgcccgtggccgatacggccgggaacaggtcggcacgctggatctggtactgcgccgcgtaggcgtcgatgttcagggccgcgacacgcgttcagacgcaatgccgtagcacaggccagcgtcgttttacctaccccacctttacctgcaaaaatcagcagtcggaatgtgctggcaggcagcgaaatggaactctctacacgtaaaggcagttgatgatgacacgtcgtagccatgacttcgttttcatcaagtaaacggaccccggaccaaaattcgtgaagcaacgcaccacgcggttcgatggcaagcaaaggcaacgtccagaatacgtgcccaggcaaacgttggtatccgttctggagcgcaagcatttgtctgttacgctcaacacaacaggttggacagtcattttcaggaaatagtcgattgaccactaaatcggacagaaacacccgttgctgattcaacgcgccagcaagatcaatgctttcttccacactcatcgcttccgccagcatcactaacacaaaacaacaacgcgtggaatccgtcaccagctcgtgcatagctttaagtgaatcattcatgtccagcagaaaatgatccagatgatccaatcgattatcaccggcaaaacgtttccggatataacgctgtttggcaagcagggtatccctgttacgggaagcgacgcggattcggctcctacgcgaccggcttcggctcgcgcgctctcgtcaccctctctactatcgacacaatgcatattcgatatcaccaccaccagagaacaatagcgacatcgacggatatcgaacaaagacctcatagctcgacaaccgattacatcaaacaaagacatctctctcgactcggcaaacgacgacttctctttgttgaatgttcgacactcgacccgcgattcggttctctttgttccgaattcgcttcaccgttcttggatcgcctattgttctcaactcgctacgactactctcgatctcgtatatatacttagttgaacttgaccgaatctatcagacgacgttcttgtactaggaaggtcaagttccaatatcgcattctatttacgcctactgatttgcaacagcactgcatcttcaagacgtattgtgaagaggttacaatccaggacactcgctaagtagtagacgtctcaccgtttgtactgaacaagcatccgatcctagctacctatagcgacattacttccttatccgtacatcaacccggattcgtatcacactaagtggatccactagtctatgctaaaaagcactaaaggaatcatctaaaaagtatgacccttttctacccatgatggctacatggtttatgggggcttgagttaatatgaactcacatccccatattggtgctcaatactactcccaaaatatactttagctcataagtgttttaaacaactttatttctttgatttgagataattactcaaagcttagcccaaaggctctcttggaatcgattttccctttgattgctcaaatgtgtaaaaacatttataaactcttagcgaatacttagttcccttataacttttgagaaatgaactcaactctttactctttgcttaacttgaaaacttgagtcttaaacgaaattaaaacattgttaaagacttgaaaactttaagaaactttgctttgacttgcttcttaacttctagacttgactcttaacgtctttgactttgatcttaactttccttgaattggattatggattcaaggtgtatgatctcatgtttatggatgatttcatgatgtttagatgtaccttagagtgttggaatcaactagaaaacatacctgaagctcgcaccaacccctcgaaccgccaataatagatttgattaaagagtaacgccccgtcagctcatctacccgccgacgcgcagcattccgcgagcgcgtgttgagctcttttcagcggcccgatactgtcccttgacgatggtcaatcggcacctaccaaggcacggctgcggcctacctgtttttgcaggcaacgctgacccagattttcggcaagcgaggtttcggccaaaatcgcctcttcacgaagtgctgtctccagcgcctccaaatgccgcgcaagtatttttaacgatccgctcaaattggcgggatcgaaaggaattttaccattagcaatcagaaccatcgccaggtcccaggcgcgctgagaatttttcatcatgcaatctccttttcgcgcctggcaacttttccaccgtcggcgaccacgcttacggtgggcaatggaaaatgcttgttgagcacgccaagatggtcaatcgcttcacggaaaagcgcttcggctttgccgcgaaggcgcagatattcatcaaacatttcgctatcaaaatcaggctgctccagcaggtcgaatggattgtagcaatagcaccaattgtgataaagacgttttctggatgtgatccaccaatccatgcaagaattacaaaatcggcaacaaatgcccagaagaagaatttaccaaatgggttaaaactattacctctaatagctgagaaatctaataatggtaataatagtaatactaagattgataataacattgctataactcctaattggaaattaggtatagctcttaaaatagcatagaaaggtaataaataccattctggaacaatagacattggagtttttagaggatccgctggtaaagcacaatctggttccataaatccatatggattatagaatgccatgtaatttataccgattaagaagataaatattgtgatcagatctttgattaaatagtacgggctcattgggattctgtccatattagctgttacacctaatggatttgatgaaccattagtatgtagagcaattaaatgcattactgataaagcagcaataacaaaaggcattaaataatgaagtgagaagaatctatttaaagtaggattagatacactgaatccacaccataagcgacgtgggggaaggcgcggaacaggtagaccgtctgcgcgatgaggtcgtcgaagtcgaaggcgttggcccgctgcagcgccgactggtacgcgccgaagatctcgacgaagacccgctcggcggggtcggacatgttggcctgtcgggcgtacgagtcggcgtcggcgagctcgttcttgagcttcgagatgcggctctgcactcccgcgggagtgaggccgaaggcatccgcctcgtgctccttcacgagccgcttgagcagggcccgggaatcgcccgagtcgtagatcgtgaagctcttggtgaacccgaactgctgcgcctcgcggcggaggatgcgcacgcaggcggagtggaaggtcgagacccacatgccctgcgcgctgtcgccgatgaggtgctgcacgcgctcgcgcatctcgccggcggccttgttggtgaaggtgatcgcgaggatctggctcgggtacgcctcgcgcgtgcgcagcagcgaggcgatgcgatgcgtgagcacgcgggtcttgcccgagccggcgcccgcgacgatgagcagcgcggggccgcggtaggtgacatactgaaattttagactctttgacagctaagctcatggttgtgacttcgtatatagcttatcttattttgtagtttgttatgatcctgtctctcttagaagtggaattgatccatcttgattgatacttgtgccatgtgtggtgagaatttgtttattccatattttgcatcttagtctagaacttgccctgcattttattgaagtgaaataaaaagtgttgctttgtttaggagatgataataggctttctttgatttgtctggtaaattttagtcttttcagatattatatcacttgttagcctttttgagcctatagccttttgttggtagccattttgcccttgactatttgttgaatccctagtttttgcaccttgcttccttgagcattatagcatagacttattctaattatcaattttgagaaaaagggatggttgagtaaaaaggtaatcaatgatagctacaaagtgcttaaaaagccctctttgaaagaatgtgatgtaaaaaaaaatgaacaaaagaagttaccttaatgatggccctggtccttccaaggacatcgtgcaccttggttatctgctacgtgatatcgtctgcttcctggcctgctttacctcttggcctcgagtctgcccgatcgtcctgccaacacttcgctcgactgccacggtgatctgctgtccgacctcggacagccgcgccacgacgggcgccagatctttggctatcgcctgtagctggctgacgatcttttcgacccagtgggcctcccgtcgctgctgtattgtcctgtttgcggtatgcggttccaggcctcgccgctggcgcagctcgcctggttgtagccctttctggattgcctgcacggcaccgcgctttaggtttgtcgccttggccagaaaatcagtcgccgtcatcttctcggcctgccggcccagattacggacaacattgttccacaggttgtctttgctgatcggcctggagtcaccgaccgaccggcgccccgcgacttcggcccgttctgcgccctcactgatcagaataaaggactgctgtttgtgccgggtgccgctggaataagccgagtggccggtgaccagcttggtgccggctggcattgcatagatgtgctctgtcgatgtcgtgattataggtattgtattaactaggttataatgttacctgtcactaatatagctcataattgaactgaggaacgaggttcagttggagctctatttaccatctttctaaatagttatcaacggatatctatgatatgatgttgaacatgtgacatatagtgatactcaacgtagtgtattatagcgtagtgtagtattgctgacaaggaaacataacagttacaataactgtctttaaactataaagtgtagcctacgttataaacgaatatatatgtaaatttcaataaaataataccaatagcattattaaaataaatatattaaatggatgaagaaagaatattattgaacaatgaaaaaaacctgtttaaacatagtgctaagatctttaatcctattcactatacaaaattccatcatacaatgcgatagaaaattaattgtctcaatcaaggatttttatctttacgctttcagtgaaaatgaaacatagaaagaacataaggggcatatgtatgtagaaaataagtaaatcaagtctcctcataattatgagttgactatatcagcttccaggcaatcagcaatcgtgccagccgcttgttagcatgctgactacgctctgactgaaccttcacgctaataccggatgccaaatgcgtggcgcgtaccgccgagtcggttttattgacatgttgaccgcccggccccgacgaacgcagcgtctcataacggattgcatccgattgttcctgctcatcagcggtaaaacgcccaatgcccagaaaccagtttttgcgcccatgatgaggccgatacggactcggacaaatccactgaatagtgccgcaccagctttcgcttaatgcccatgcgttatcgccatccagagaaaccagagctgaacgcagcgtgtcagagtagcggcccgtttctgtttccagcaccgttaccgcgacgtcttgccgggtaaaaacgaccaacagagaagaacgctgcgccaatcgggtagccgcgtccggggtgtaaatctggcatccccactacgcgctgcatgttgggtaaatttgccgtggtgtgtaattgttggatcgctaaactctcgatccacaggtcatcagatgcgatggtaaatacgggttcaagttaggggcggggttaggaaagacgggttgtagacgtgagcgcggtgtgacgactggctgagaagacgggacgtcggacgtacgctagcactttatgtgcttccatcgatcggttctacaacgagtcgaaaacgatgactcagtcagcgatgacaccccgaatcgactggaatctcttcccaagcactaaagatcagggtcgaacccgggcgcgcagggtactgacgttgttactcgcacagacgacgcagaacaagggtcggttcttgatcctcggtactggcgcttcttccaccgtaccgaccacaggtgtggagctggatcccgagccggtcgagccgggtatcgtccccgtccccgtcgccaagctcatcggtactgacggaccgggacgcatcatcgttccttgaccaggatgggtgatcggtccgagaccacccgcagcggggataggcaaggtcgggcgtggtaacgaaggtcccccacctccaaacgacgtcgatggaggagttgcgggagttggtgtgccgtatggcggtcgggcagggggatgtgaggggcccagccacaagtcatccgctaagttttcaacattagtcggttccgtcctccagttagtgttacccaaccttcaacctgcccatggatagatcgcccggtttcgggtctattcccagcgactagacgccctattaagactcgctttcgctacgcctcccctattcggttaagctcgccactgaaaataagtcgctgacccattatacaaaaggtacgcagtcacctaacaaagtaggctcccactgcttgtacgcatacggtttcaggatctatttcactcccctctccggggttcttttcgcctttccctcacggtactagttcactatcggtcagtcagtagtatttagccttggaggatggtccccccatattcagacaggataccacgtgtcccgccctactcatcgagctcacaatatgtgcatttttgtgtacggggctgtcaccctgtatcgcgcgcctttccagacgcttccactaacacacatactgattcaggctctgggctgctccccgttcgctcgccgctactgggggaatctcggttgatttcttttcctcgcagtggtggcctgcagcgagctgaacagggcgttggacgaggtgtcggagcctgtcaggaaaacccccagccagccgaggaaaggcgagaagaacgggaaggcagcgccagtgccggccaataccagggccatggtcgaggacatgccggaatagttggtgacgaacgcaaacgccagcaccatgccgatggacaggattggccagcgcaattcgtagaaggtttcttttaaagtggtcagaccagttttgatgctgatcttcagcacgagcatggaaatcagcgcggagaagaaaatcgcggtgccggttgccgaaatcgggtccagcttgaacacggctgggatggcagtggggttggtcacgattggcgcgactttgatcaccaactgatccagatgcgggatcgcgaagttgaacacccagctgtacatcgagccgccggcggcaaacatcgccttgaacggcttgagggtccagatcgtcaccagcacggtgaggatcaggaacggcgaccaggccttgaaaatctgcaccaggctgtagggcgatgcaatggcctgaaggactacgacctctctattctttatcatccgggcaaggcgaatgtggtagcggacgccttgagccggaaggcagtgagtatgggtagtctagccttcttatctgttgaggagcgacccttagctttggacattcagtctttagctaatagcatggttcggttggatatctcagattctagacgcgtcttggcctttatgggagttcaatcttctttgcttgataggatccgtggttgccagtttgaggatgataccttggtggcccttagagatcgagtgttagcgggtgatggtggtcaggctaccttagatcctgatggagtgttgagattcgccggccgcatctgtgttccgagatttggggatttgatacggttgatactttctgaggcccatgagtctagatactctatccatccgggcacagcgaagatgtatcgtgatttgaggcagcattactggtggagtggcatgaggagagatattgctaattttgtttcccgttgcctgtgctgccagcaggtaaaggccgacaattgaggccccagagtggtatctcactgatggctcgggcccccccggaaggaggccttcttcgccttccacctaagctgcgcaggaaaggcccaaagccaatcccagggaacagtgaagcttcatagggtctttctgtccaggtgcaggtagtccgcatcttcacagacatgtctatttcaccgagcctctctccgagacagtgcccagatcgttacgcctttcgtgcgggtcggaacttacccgacaaggaatttcgctaccttaggaccgttatagttacggccgccgtttaccggggcttcgatcaagagcttctccgaagataaccccatcaattaaccttccggcaccgggcaggcgtcacaccctatacgtcttcttacgaatttgcagagtgctgtgtttttaataaacagtcgcagccacctggtctctgcggccctcttcagctctgaaagtaaatcccatcaccagaaagggcgtaccttctcccgaagttacggtaccattttgcctagttccttcacccgagttctctcaagcgccttggtattccccttgttcttcctctgcccctttttacccgtcccgtctccgaaccctggtgcaccggactatggagcagcgaaagcggatcgtcaataaaaggccctggagatacggtcgacagagggggtacgctggggggtacgggggaggccggtcggtgactcactcctccatgcaagatctggatggcagccttgagcgtctgcatcgggttcctactccccttgatcgtggccgaacaatccctgatcccacaggccgtcaagagcctatgcagcgtcgggggtacggccagtccgaaccccgccggtcggccacgcatgatgacctctgtcgatccccatttggcggaaaggtccttgcccgccccccacagagttctcccctcgaacttgtcgacgtggtccatactgagcacggcgcgttgaaaggccgagtctatggcagtcggagcggcgtctcctcgacctcgaccgattcctacgagtccccgggagggggaaccgacgacgaccatggcgaacagcgagggcctggagaggagagcgaaaaggcctatgactatggcgtgcagaccttgatgagttttttcaacgtgaccaaatacccaccgtcactgttgcttttggcgctgacgctgggggttggtttgctgctgttgctggcgttcgagcgcgcggggcacaaacgctggattggcgtactggcgaccttcggcgcagcgccgatgttcttttatttgctgcacctgtatgtgctgaaagtcctttatgtagcgtgcgtagcgctgtttggacttaaccagggcaagtattttggcttcgagggtatcggggcaatatggctggtggcgctggtgttgcccctggcgctgtataggccggtgcgctggtttgccgagctgaaagcaaggcgtcgggacattgcctggctcaaatacctctgatccaacacgggccaaatgtgggagcgggctgacggtgttaaacgctgggtatcaggtgcacataaaacgcgtgaaacatgaaatacgcacacaccgccagcgcaatccccatgcagcggttgaacacggtaaacgccgacgtgccgttgatacgagacaggtcatactgactacattgattttaagtcattgataaataacgatttataagttggcatgaatactgagtaagcaaaggcaatcagtcaaaagacccaggagtctgccatgcttagtgcccaagaccgtgccatcgtcaaatccactgtgcccctgctggaaagtggcggcgaagcgctgatcacccatttctaccgcatgatgctctccgagtacccagaagttcgcccgttgttcaaccaggctcaccaggccaccggcgaccagccccgtgccttggccaatggcgtgttgatgtacgcacggcacatcgaccagttggaccaactgggcgacttggtggccaagatcatcaacaagcacgtggccctgcagatcttgccggagcattacccgatcgtgggcgcgtgcctgctgcgggccatttccgaagtgttgggcgatgagatcgctacccctgaggtgatgagtgcctggggtgcggcctacggccaattggcggatatcctgatcggcgctgaagcggcgatttacgaccatgtataccacgcataccgacagggtcaaaatattttacatgatgtcaattttgtaattgaagcaggaacgtctgttgctctggttgggcattcaggaagtggtaaaacgaccatagccagtttattaccccgcttttatgaattgagtcaaggtatgattactttagatggcatgcccattcaacagcttagtctggaaagtttacgcaagcagatgtccttggtcagtcaaaacgtgacactttttaatgatactttggctaacaacatagcctatggtcgttttgatgcgagccgagagcaaattattactgcggctaaactggcctatgctgatgagtttattaagcaattacctgatggctatgataccagggtcggagaaaatggggtgttattgtcaggtggacaaagacaaagaatagcgatagccagggcaattttgaaagatgctccaattttaatacttgatgaggcgacttcagctctggatagtgagtctgagcattatatacaggcggctttggagcaagtgatgaaccaccccctcctcctccttcagctggatcgaggatgcctccaccacctcctggtcgaccgtgagtccatcgaatatacactacgaggtgatcagtgtacagcgatgtctgacgcggcgtgtccccatcggctcgatgcgattcttagagctcccccaccattgccgggttcggctagaaaggcacctcctttgccttcgagatcgggagccagttccgtaagtcctggtcgcgtcgagacgagtccatgaacgggcggtaaacgttgacacgggatccgatcgactcaacagcgcgtaccgcccccacccccacctccgggtgtctcgatggcaaagagacccatgcctcctccacctacattgccttcccgtgcaggcagtgtgcgacaacctccagctcatccggctccggcaatgtacgatcaggcgtcggatgaagaggaaccccccgtcccgcctcccttgccgggtgcgtcccctgcgaggaggttgcctcctccaagtagagaggcgagttcgagcggagcgccgcctcccatacaacactacgcttgctaccgcgagtggaagtgttcctggtactgttgaggtagttgaacctctggctggaactgtaactaccactgtttattctggaagtgcagaatacaacactactcttgctactgcaagtggaactgttcctggtactgttgaggtagttgaacccgcggctggcactcttactactactgtatattccggcagtgaggcatttactactactgttgcttcagcaactggcggtgcttcaggaactgttgaggttgttgaaccagctgctggaactgtttatcaaacttcatgtatgggtttaccactcacgcttagccttactttagctacagctaatggaactgttcctggaactgtattggtttatgcgccgttcgctgggtactatactacgactatgtattccggtagccagcagtatactaccacggtggctacggccgccggttgtgtatctgggactgttgaggttgttgagccaacagctggaactgtaacttccactgtttactctggaagttaacgtaaggtgaccgccaggtctccttgtaatccacatcccctgccatgccgacgatgtcatcccggacattggtgttcatcggcacttcaatgccacctgtcagcgataactgctgaccatccactttaaaaaaacaggttccggcgatctttgccattatgctgactcctctgaatactgaagacggaactggttaaccaccgcaaagacacgtaactgattaacataatccggcgggaacagcgtattcagtcggttcgggttatctgcatcacgctcaactatcagatactgtttaaacagatcgtaattttccacaataccggcacgctccatctgacgatatgtcgccagaagttcccctttgataacggcaggagtgacaatcgcctgccccggaccaaaacgggtaccatcatttgccagcttgtgacgtccgtacttgcttgtgatgaccgatttcagtttgcgaagaacatatgcactggtatgcagagtttcactgtccagatagctgttgtctgccacgccacaattagaatagcaatccctacttttttgttttccattgctcagtagcttttctccatccatttacttactttgagcctataggtgtcattgcatgtgagagatggatctcttaaagacaacctaccattgtgtcttgcttctttatccaacttgccactctgttccttttacctgagaaatttatcctgtttatattcaagattaacattgatatgtgtgaatttgatcctgtcattatgacattcgctgcttattctgcccgttaattaaagcagtttcttcataggatcgacggtctttacaatttggcatgtttttgctggggctggtaccggttgttcctttccatgtttagtgcttgtttcaggagctcttgtaaggcaggcctggtggtgacaaaatgtctcagcatttgcttgtctgtaaaggattttatttctccttcacttatgaagcttagtttggctggatatgaaattctgggttgaaaattcttttctttaagaatgttgaatattggcccccactctcttcggtaaaatctatattttacttacttatctagttttcaatgtacaatttctttttagtcaagcgctcgcatactgctttattatcacaagcaatatcgctttaaccaaaaaatatttgaatgttaaataaacattcaaaactgaatacaatatgtcacgttattccgcatcttctgaagaagatgttccgaatatatccttagaaaggaggtgatccagccgcaccttccggtacggctaccttgttacgacttcaccccaatcacttgccccaccttcggcggctggctcccttgcgggttacctcaccgacttcgggtgttgcaagctctcgtggtgtgacgggcggtgtgtacaaggcccgggaacgtattcaccgcagcatgctgatctgcgattactagcgactccgacttcacgtagtcgaattgcagactacgatccgaactgagactggctttaagggattcgctaaaacctcgcggtctcgcatctctctgtaccagccattgtagcatgcgtgaagcccaagacgagggaaggagggcgggggggcggagcgaatcggcgtgccagtcacactcaaacgcgcgattcaatggtttacaacgagtctcagctcaaactaccccgagcgaatgacaacaccgccacccaacgtacatcctgcgacgtcaccgatcaatcacttctcacaggtcaccccttgcgattcatacatacaaggtatgacaagaggtcgaatagatcttgtcaaacaagaatcgaggtccttgatgttggtagagatacgattgcaggtcgaaacgatccatgatattccccgcccgccatttctgacctttgaacactcctccctcaaagcccgtttaaatccctcactcaggctcggtgaaccctttgtcgctttctcacgcgacgcgcatctttcccttttcccttccctcctctcgctctctttctctcgcaactttgcaatttctttccctcactctggctggctttttcgcccgtttcctcccccctccttcaaagattgacaccctttcaacgaatacttttgacgccgtcgtgactgaatttcaggtcgacgttcaactggttctggccatcagccagttgataagtcttctgttcggtcgaataaaccggacgaccggtagcacgagcatccggaccgttggtgccggtcaagccactttgtgccagataagtacgttcaccaccgttatcgaacagttggaacggaacatccgggtggtcttggcgacgtggatacagcggcagtttcaactgcgcgatatcaccaccttgtgggtcgatagccaggtcgagcacatccgttttgacatggatgaggtctttattggtgaccactggcgtttctaaaggggcgcttgtctcgccattcgcgctgggaacatcggcactcgcggacgcattgttacccagcggggtgtccggaatagccggcgcagcctgattggtagcaacattctgagtcggcagggcagcttggccatagtcctggttccactgaagaaccatgacgtaggacacgattgccagggcgacgatcaggatggtcggcactgagtggcgatgctgggtgatgcccatcgcccagcacatgatcacgttcttgcctttggcgtacatgcgcgccgcttgctcgatctcaaccagggtcaggccggactgctcgacgatttcatcccaggaggtgtcgtcgatcttgcccaggtaatccagcacgttggcggtgtgttcgttgaggaagttgtggtcgaacaccgcttccttgccttcggcctgggcctggcgctcccacaggagcaggaatttggccatgccacgcaagatagccatgtcgccacccagcgccgggcggaagtaggcagtgttggttggtttgtcgccgttggtgagcatttcaatcgggtgctgcgggtgctggaagcgctccaggccgcgctctttcagcgggttgatgcacaccacctgggcgccgcgttttaccgcttcgcgcaagggttcgagcatgcgcggatggttggtgccagggttctggccccacacaaaaatcgcatcggcatgttcgaagtcccatatacttcgtcgagaggttgtcccgctcatagcaaatcccctgcttttcacccctccactgacattttcttcctctcgacttcgaaagatcatggccgtcgtctccggaggcgtcatgtacggcctcgtctccctcaccaagaaatacctcttgccgcacctccaaccccctacccgatcttcctttgaatccacctcgcacgacctctctgagcaattcgacgtcgctcagctcctgctcgaagagctgaaatcccagacgcatgacctacaggaagacgttcagggggagagggagagggtgaaggacgtcgtcgagcaagtaagggagatggtgatcaaggtcggagagggggaagagaggtggagagaggagatgagggagatgagacaagaggtggaagagctcaagagtctcgtacctagggtgagccacgctgtcggtctgcgcggggcaagggtcgagcactgacccccgagggtccgacccgtcctctccgctttgttgccgttgccggttaaataatgtaccttaaatcagtaggcttatggcaccttttcatgtgtaatgatgttaatgtaatgaattactctttgagaatgtaggcttagcaccgagtggatatggtaagatggaagctctccctacgttaggccgggtttcaatgaacatcttccttatcccataactatgtgcccacatagtagctagtggttccaccaaagctaaatgttaccggtcctaccttaggcaagtagatcacgtctttacggtgtggggctatatgacaccgtattccatgttaagctcacatggtctatgtcggttaaacacttattcctatcatgtgagatgtgcactatggtttcttgagaagttctatgaagtgtgggtggtagtatgggatgccatccatgcattgcacgagtaggctttaagagggtcatagtgagttctctaatgtcttcatgactaatgaataaaagtgctctaaatgaagctaatgaagaatgttgacttatatgcttaatgcacggataaggaagtaatgtcgctataggtagctaggatcgaaagcttgttcagtacgaacggtgagacgtctactacttagcgagtgtcctgggttgtaacctcttcacaatacgtcttgaagatgcggtgctgtcgcaaatcagtaggcgtaaatagaatgcgatattggaacttgaccttcctagtacaagaacatcgtctcccggcttcggtcaagttctactaagtatatatacgaaaccgagagtagtcgtagcgggtcgagaacaataggcggtccaagaacggtgaagcgaattcggaacaaagagaaccgaatcgagggtcgagagtcggtcatctaacaaagatgaatcgttgttgctgagttgagatgtctttgttcgatgtagtcggttgtcgaactatgaggtctttgttcgatatccgtcgatgccgctattgttcttcgctcatggtaatatcgaatatgcgttgtgtcgatcgtagagagggtgacgagaccgcgcgagccgaagggttggatcacctccttaccgagttgaagtgcctgcgtggtgtccacacagattgtctgatgataagaaagagtcaaaagcgtcttgcgaagctgacaagtgatgtccccttcgtctagaggcccaggacaccgccctttcacggcggtaacaggggttcgaatcccctaggggacgccacttgctggttcgtgagtgaaagtcacctgccgtcatatctcaaaactgacttacgagtcacgtttgagatatttgctctttaaaaatctggatcaagctgaaaattgaaacgacacatcttaaatggtgtgttcgagtctctcaaattttcgcaatcatgaagtgaaacatcttcgggttgtgaggttaagcgactaagcgtacacggtggatgccctggcagtcagaggcgatgaaggacgtgctaatctgcgaaaagcgtcggcgaggtgatatgaacctttgacccggcgatgtccgaatggggaaacctagtgtgttccgacacactatcgtcatttttctcttcatccttgttatcagcagttgtagttcctgcttcaacagtggtagctgaaacaggattagaagtctcagcggttggttcatcggggagattcgcaggctgattaatctcagatgtattaattaaaccaagatctgtgtctgcttctaattcttccttcttaattagttcttcatccttagaaggaccatataaaggaatatcttcgtaattattatctaaaccgtcatcaagaacagtggtacccgtagatggtgcagtactattcgcactgttcgtaacgtcttccttggcaatggatttcggaatgggacgagtagttcgcttaccatcacgcttcttgaatttcctacgctctgccttgcgagctctatacttaaggatatcgagatatgaccattgttcacgaggaggaccataaatcaagcgtaaagagttgtcatcttcatcaactagccacttgccattctccatctcgtatgccgtcttctgctcgaaaaaccccctttccctcgcctccacttccgcctcttccctgcaatcatcattgatttgcatccgccaatccatcaacccatccatcctctagcctacccacttctcgacgacctccaattgacatcaagtcagtctgacaaggtcattcggtatttgaccgtaacgacccgaacttgcacgtacaagtcgcaaacaaaccaatcgtgaagattgaagcaggaagccgccatggcagagtctcaggaggacaaggtcagtagggaaatctcgcgaccattgcttgaacatcattcttcccgggcgtattcgtgcatacaagctgacctgaacctcgtcgcctcgactcgacatagatcgcccgtcaagctcgtctctcgaaagcgctctcggcggcttatctctctcatcagataaatcagctcgaagacaaggttcagggggccgaagcgggaagacggtccggctcgccttcgactcatagaggaggcggaggcggcggtcggggtggtggtggactttgcgacgatctattgtagtggcggtagacgcggcttggagattgagttgtcaccgtcggatttagcaggcgcagtaaacgccaagtttgcagatttaattcaagaataaaggataacaccatgcccaatgtcattattgaagtgagtcacgaccatcttattagtcagcccgatagcctattagcgcgggtcaatgatacgctatggcagtctggcaattttaagctacaaagtgatatcaaatcacgtatttactacccaaatcatgtcttagtaggactgaccgatagcggagatgaagcctttgttatggcgcatttttatctgatgccagggcgggatgacgctaccattcaatcattggcgcagcgcattgccgatgctatcaaagcgcatctgcaggcattcgaaagtcgggtgccagttggcagtttgcagatttgcgtcaattccactattctaagcactaactatgtcaagcaaatcatttaattattctagacgagtctgaacatacggcaccttatgattgttttctcctcgttacaaattcgtcgcggcgtgcgcgtcctgctggataatgccaccgccaccatcaaccctgggcagaaagtcggcctggtgggtaaaaacggctgtggtaaatctaccctgctggcattgctgaaaaatgaaatcagcgccgacggcggcagctacacctttccgggaagctggcgactggcgtgggtgaatcaggaaacgccggcgttaccgcaagcggcgctggaatatgtcattgacggcgaccgtgaatatcgtcaactagaagcgcagctacacgacgccaacgaacgtaacgacgggcacgccattgcgaccattcatggcaagctggatgctattgacgcatggagtattcgctcccgtgctgccagcctgctgcacggcctcggtttcagcaatgaacaactggagcgcccggtaagtgatttttccgggggctggcgtatgcgtcttacccttgcccagacagcgatcccggatcgggagaagggcagaaggcaggggttcctcagatgcggcatacagcttcgccattagttccgctgcaatttcggtcgcctggtagtcgccgtgctcggcaacgatgtgagagagcattcgctccccggcatattcgagcaacatcagattgttctcacgaccgagcaaccggactgctcccctcccattgcgccataccagatagtcggccccgcgcagttcatcagcaatgtcttctataggtttcaatcccttgacgattgcaggagtcccgtctggcaatgaaactttccaaacgaggctggaaaaggtgtccgcaatgagaacaggttgcgaaacgtgccaatgagcaggaaaaacaggcggcatgaacatcaaccccaagtcagagggtccaatcgcagatagaaggcaaggcgttcgcggtcgggggcttcgatccccaatacattgaataggacagcgaaggcgcgctctgcttcatctgggacctcaaatcaggtaggactacgcgctgaacttaagcatatcaataagcgcaggaaaagaaaataaccatgattccctcagtaacggcgagtgaagcgggaaaagctcaaatttgaaatctgtcaacatttcttttgttgtccgagttgtaatttcaagaagctgctttgagtgtagacgatcggtctaagttccttggaacaggacgtcagagagggtgagaaccccgtctttggtcgattggatatgccatataaagcgctttcgaagagtcgagttgtttgggaatgcagctctaaatgggtggtaaatttcatctaaagctaaatattggcgagagaccgatagcgaacaagtagagtgatcgaaagatgaaaagaactttgaaaagagagttaaatagtacgtgaaattgctgaaagggaagcattggaaatcagtcttacctgggtgagatcagtagtctcttcgcgagactatgcactctgaacctgtgggggtggccatatcgataatcagctctggcttctgggcagaagcgtcgatcaggccatcggccagccccagacggccttctgcatcggtattcatcacttcaacatttttgccgttgcgatagcgaatgatgtcgcccagcttgaaggcattaccactaaccatgttgtcagcgcagcacaggtacagcttcacgcgttttttcaggccacgggtaattgcaaacgccagcgcaccggtgatggttgccgccccgcccatgtcggatttcatggagtccatgaacgcgctctgcttcaggctgtagccaccggtgtcgaaggtgatacctttcccgaccaggcaggcaaacactggcgcgtctttatcgccggttgggttgtagtccagcgccagcagcaccggaggacgctcagagccacgacccacggtgtgaatgcccatgtagttctgctcgcgcaggtcttcacctttggtgatgcggtaagacatgttctctctctctcacaaaaaaacacccaacagacaaccacaaagatgtccctccgaacgtccaccgcccgagctctcaagcaagccgtccaggcgcctgcaaagaggtcgttctccttgctcgccaagaacagcggcgccgccgtcctcgccgctaggcctcaggtcgccaaggtcgtcgctcccgccgtcaacgtgagtacagacagcgattgacatcgacgacgacgacgaagacgtgaggacgagagctgatcgggattcggatcttgcatttcggattggatttttcgtcgtctgggatttcaatgcttttctctctttgggattctgctctacttggctttgattatccttttcgtctcttccccctcttccccccctctctccctcgatctttgacgtcttttttttccacctcttttcccatctgatcttcctccccatcatcatcatcatcgtcgtcttcctcccactccctactcccacccctgacattctgctctagttaagctaccttattttgttgtggtagctggtcatagtaaaactcatctggagtcattttgtccagactcgaatgaggccgtttcaaattataaaattcaaaatatgcactcaattgctttttcgcatctgtgacactgctataagctttgagatacacttcttcatatttaacgctccgccataatcgttcaaccatcacattatctacccatcgacctttaccatccatactgatttgaatgccatttgatttcaatacatcaataaatgcatcactggtaaactggctgccttggtctgtattaaatatttcaggtcgaccatatttttcaatcgcttcatttaaagccgaaatacaaaaatccacctccatactaatcgataccctatgcgcaagtaccttgcggctatgccaatcaatcacagcacataaataaacaaagccttttgccatagggatatacgttatatccgtagactataagagacagccaccggtgtgggcaagaccgaagtcgccaagcaattggctgcctcgctcggcgtcgaactcatccggttcgacatgtccgaatacatggagcgtcataccgtgtcgcgcctgatcggcgcgcctccgggctatgtcggcttcgatcagggcggtctattgaccgaagcgatcaccaaacaaccgcattgcgtattgctgctcgatgaaatcgagaaggcgcacccggaagtcttcaacctgctgctgcaggtcatggatcacgggaccctcaccgacaacaacgggcgcaaggcggatttccgcaacgtcatcgtgatcatgaccactaacgccggtgccgaaacggccgcgcgggcctcgatcggcttcagccatcaggatcactcttccgatgcgatggaagtgatcaagaagagctttacgccggagttccgcaaccgtctggacaccattatccagtttggtcgcctcagtcacactagcttcctatgcgggcacatagtttatgggataaggtagacgatcattgaaactcatgcctaactattgggggagtttccatctaaccaaatccactcggtgcttagccaacattcccatagaatagttcgttatcttgacattatcacatatgagaggtgccattgacctaccaactccaaaatacattcattaacacatgaaagggtgctttaagtctaccgtttcaaggttcatttaggaaagctcattaactcctcttgaaagggtgccatgggcctaccggttcaagtctcatcattaaccttcatggaaaggcgccataggcctaccgattccaaggttcattactaatcattaatggaagggtgccattagcctaccgattccaaggttcattattatcatgagtggaagggtgctactagcctaccgattcgaggattccacaaccaacaatataatcatttaaacaagaaaaggatgacctttgccggagcattagcggaagcaggtgatctggtacaaccactcgaaaatggcaagttagcacgtactgcaatcgttgcagaactcgccggtctgtgccagcgacatcacgatggacgaaagtctcaggaagaaattaccgtctttaaatcggtaggtacggctttggaagatttatgcgcggcgaatctggtctggagcagacatcaagccagataattttggaaatcaacaagtggagactgtattcagcctccaccatttcaactcaagacttaggtaaaccacccagtaaagcagcccgtttctgaggtttagctgccggggtcgacgaattgtctgcttttgcagttgtcgttactgctgtctgactaggttcatacggtttgaggaaccatggatcaactttttctctcgaagcatacgggcgtgaggccggtttatcattccgttcataacgttcgttacgcacaggactatctgaatggcgacctcgtcttaagataagatataggcaataagactttaagcgcacctgagcgcctttgcccatagagaatactggggacgaaagtctctgggggggttctatggagcaagtctcccattgctttcgcaaaccagtggggacaaccccccaaaaaaacgagttttccacgcggcgatctttatttgaaatatgagccgctaaaatttctcccttttgaatgtatttacccctatgaacctgatgcatacaagtctttctgtttgttggaaggcttatacataatacataaccaaaggaatgcttatagtgtacccattacctgataaaacgatcttttccggtaaaaaaaaatgatctttcccttgtgttcggctatagcggaaaccaaaaaatctagagcttatggtctttagttccaacccagttccaacaatgcacttctcggcacatcatcggtaggggaaagcggaactgcttgacccccccctacgacgactttacagggaaaagtccctgcaaaccaagttcctcctctcacctctttttcatggtccgaccactctcccaacctcctcgtcacctcgtccatcgataccacctgcaccctatgggacatccatacctcgacggcgttgacccaattgatcgcacacgatcgagccgtacacgacgtctcgttcctgccccactcgtccgacgtctttgtcagcgtcggctcggacgggtctcttcgcgcgtttgacctgcgagcgttggaacactcgacgatcctgtacgaggatccggggaataaaccgttgatgcgggtcgagtttgggaagaaggaacaacattacttgggtgtgtttgggatgggggaagaagctgtgcaggtcctggatatgagaagcccgggggtccccgtcgtcgagctcaggggacacaagagggggagggacggggcggtcaatgcgatcgcgtgggggagggggaacgggggagggaacgacggaggatcgttcggagcatcttgtgagagtagatcgggcgaggtccgatggtcgatgattcgatagtcgatagtcgatagtcgatgttcgatgttcgacactcgatcggggcgtcgattcgacctagctggtggcaggtaggtaggtaggacgagcttgatcgcaagatcgactggacgcgggtaggaggagaccgaggcgtatgaaccgaggatcgagggtcgacttgatggcaagaggatgttcgcctcgtagttgtttggtggtggtggtggtggtggtggtggtgttggtgttggtttgtacatgttcggggggtcttgccatcgatcgtcccatcccatcgaggtggtggtcctgcctgctacgagatttcccgagattcaacgctgacgacgagcgagcacggggggcgatgatgatgcgaggcgacgcgtttacggaagcaaacaaggtggggaacacaaccttggtttaacctgcgacccggttgcagggcaggttcaggtgccgtgcattgagcgtaatgccattgcctctgtgaaggcgattaacgccgcacggatggctctgcgccgcaccagtgcaccgcgcgtctcgctggataaggtcatcgaaacgatgtacgaaactggtaaggacatgaacgccaaataccgcgaaacctcacgcggtggtctggcaatcaaagtccagtgtgactaatacttcttactcgcccatctgcaacggatgggcgaatttatacccgctttctcgtctgctgtaatattccccactacacttccactgttgcgtcaggcgtttgtcgccatacgcttacagggtggcccgcatgcaaaaagcacaacggatcattaaaacctatcgccgtaatcgaatgattgtttgtacgatttgcgcactcgttacgctcgcttcgaccctgagcgtgcgatttgcgtgatccttgtatttatacttaagggataaatggcggatatgaaatagtggtttagcccagtaatgacgaggctttgagtgggttttgacaggtcaaagaaaatggagcagaattgaggcgtttttaatcggcgttggggagtgcgtcaacactccccaacatttcgaatgtgtcacctcagcggcaaactctggtgacatgtactggctcgcaatgcacaggtacgtgatgaatataccacatcaaatcacagcctgcccagatcggagcaggcttaatgtcagaagataaattcctttcggactacagcccccgtgatgcagtttgggatacccagcgcacgcttaccgattctgtcgggggtatctaccagactgctgctgaattcgagcgctatgcactccgtatggcctcctgtagcggtttgttacgttttggttggtctaccatcatggaaaccggagaaacgcgcctacggtgctgaactatatgagccgtttcaaactgctgttcgctatgtagttcacttctttattcgtgatagtcttgaagtacccttcatatggcagcaccgtcgtgattatatagtgcataacaatcgtgagaggaacacaattactcctttattaagtcaaaatgatttgtggaatatttttttcctttgcaccaagttttggtcacttcattctaagaagcaagatatcctaaaattgtactctgatttgggaattaatgatgatttagtagttcccttctgtgaagctgcttcctctcttgatgcaattgatgaccttaatgattacatacatttcacttattctgaacaaatccgtgatcgtgccttactgatgggtactggtcttcgtcgtccacaaggttcgaagtattctttttttgaaaaatttagaaaatcatcactttacaatctcgtcaaagaatttggtatgagtgctaaagactgttgtgaagtaacaactagatccacaaagattggttacttgctgggtctaggcaatagcaatggtctattgctagtgctgatcttgccttgttgtgaaggggaatcaatgttgcttgcataaaagtaaagtagtacatgagaagggaaaggaaatcagacccaaatggtctcctatgtatacttttctggaaggtggcaagtggtggcaaataatgactcagagctctgactaagagcttgtcagtgtgaactgttcacatttgaggggttctgccattggtggcaatagtccctcacgtcttccagccaatagcagaagtgcctcagatttgccacccattggcaataatgtctcagtggcaaaaatagatcttctagcatgttccatgggtttgcctcctgtttgcttcctgtttgcttcctctgtttactttgtggttgagattgcttcctgcatccatgagccaatcatggcatgtgcctatcgcaaggcgttcgatgagtttgtcgagctgacccagaccaaggacctggcactggaaatggccagttggtcagtgtccagcgtggccaataaccttgacgtgttgcaggccgggctggcggatgacggcgcctatggtctcaaggaaagccaaggcaaggagggcgccgagtttatcgagcaggcgggccaggtcagccaggtttcgcgcttgatgctgcaagcaatgaacgaagcgcgggtgcgcctggaccagagccgcaaggtgagtgaagacgacaccgagcaaggcaagatcgagcaggccgaccaggcgctggcccaggtcgagcagttgaaaacgtcggtcaaggactccggctatcagacggtgctcaatgaagtctccggccatatcgcggcattcagcgaaaaactcggcgaatacaccgggctgttggcccaggaaaaggtggtctacaaacaactgaatgatccgatgtcgaacagcaacgacaggcgttcttccggcaggggagtgtcgcggtcgaaggcctgcatcaggtaggcggccttgctgatgtcgcccatcaggatgccgccaaccagcctgccgtcgcggacgatcagcttcttataggtaccgcgcttcggctcggtgaactggacgacctcgtcgcgctcctccaccggttcggtgatgcccatggccgcgacctcgacgcccatcaccttgagcttggtcgccagcttggagccgtgatacgcggcgtcgcggttccgcccggtgatgttttcggcgaagaccttcgcctgatcccacagcggcgccaccagcccatagacccgcccccggtgctgggcgcattcgccgactacatacactgtgctgtcgtcgaccgagcgcatcttgtcgtccacgacgatggcgcgctccaccgtcagcccggcgcgcatgccgatctcggcattgggccgtccgggtcgtcgaaaggcgacacgaaggtgctccccgatgtctgcgccagttgcaatgcatgggccagggcaaacgggaaactctccccgtgcaacacggcttcggccccacgggaacgcacgcccaataccttcagttccggagtgctgcacggcatgacgatacgtgccttgatccccaactcccgcgccgccagcgccacgccttgggcatgattgcccgctgaggccgtgaccacgccccgggctttttcggcatcactgagttgcaccagcttgttgtaggcgccgcgaatcttgaaggaaaacgtcggttgcaggtcttcacgcttgagcagcagcgtgttgcccagcaaggccgacaacgccggcgctgcttgcaggggcgtgcgcaccgccaggtcatacaccggcgcagcgaggatctttttcacatagtgttcaagcagttccgtgccggcggtgcggggcgtgggacacttgcattgtctgtagaaattgggaatccaatttctctttgttggggcccctgactagaattgaaaaaagcttgttacaagcgcattttcgttcagtcaactacagccaatataacttcgtaaagcatagaacattgatttatgtcccagcctcacttaaaaaattgattctatgactttgattgacgtcttaaacatgattaaaatatgattttaaacgttgttccttcgttaatctcacttttaattttaatcgatccaccgtttaattgaatgattttttgcgcaatagataatccgagtccattaccaccttgacttcttgaacgagatttatccactcgataaaagcgatcaaaaatgaaatcttgatcttcctctggaataccaattccatgatctgtaatttcaattattttttgcttattttttaaccttgtcttaactttaattttcttattcttcacatcatatttaatggatacgtcctgaaggacatgtccccagaggcgatcctcgacgcgatccgcaccgtccatagcggcgacgccgtgatcgcgcccgccatagcccaccgcctggtctcggagatccagcggccagggggacgccggcgggatgatgcgcttgcagctgagctgtcggagcgggagaccgaggtgctgcagctcgtgggccaggggatgaccaacgcggaggtggcatcccgtctgttcatctccgaggcgacggtgaagtcccacgtgagccgtctgatggtcaagctcgacgtcggcaaccgcgtcgcgctggtcatccgcgcggttcagcggggcatcgtgtcgatcgatcccacctgaggtcgcgactttcgtcgcacgtcgcggcgacggttagccgatgcggtgcacgtcgctcgcttcttaacgttgcgggagaccgaaggagacgacgtggacgcagcgatcgaggcgcgcgaaccacttgtgtatctggtttataacgctttaaacggcgagttgccgaaccaattaattcatctaccccaatccaatctctttttaaagttagaccttcgtggcccaaacgggtcatatcaagcaagttttgaatataacggtctaaacgctcaccttctaaatgaattgtttcaagcagatcttgttggtcttgttctgacatatcagctttaaaattagcaagcgtgtctgctgcgccaatgatagaagcaagtggcgaacgtaaatcatgcgataccgaagataataaagcagaacgtaagcgctctgtttcactggtgacttttgcttgttcaagctcattcaccaattgggttcgaagtactgcctgtgcaatgtactcaattacactttcagtcaattttttttgctcaaaatttaaggaaaccacttcatccttaaagtaaattcccacaacacctaggctatttttttgttcgtgtaacggaataactatctccagtcaaacctttatgatatttcaatggtcccgctgtttggagatctacccaagtgatgtgattccccgacatatcaacatcgatatcgcgagtatcctcacgaacaccatgcatcaccgccgctgcaccatagcccaccacaatcgcatttacaggaagatcaaacttctgactgaatgcatttactttctcaatgattgcttgtttgttcaacatgattcaatttccttatacatctaggttgattatcctagatgtaatatagtcgttaaacgagttaaattacaatcttgggaatgtactcaaattgttcaaccatttctaacttaccaaaggttcgaacactgcaactgatcatgggttctttgtcttccttaaagatcttatcgaagtgtttcttaaacgaaggcattggaatgatatcagcaacgactttgtcatcaacaacacgcattcgcgcacgcagagcgcatgccggcgccatcggttcagcggtgcgcttcgaccgcctggatgccggagacggcctcatcgacgatggattcgacagtcgtgtcgacgtcgaccacgaagccgggttcatcggcgtcgagttcctcgaggagcgcgaactgcgagtcgagcagcgacgcgggcatgaagtgcccggagcggccttccatccgacgcgagagcacgtcgtgcgttccgtggaggtgcacgaacaggacgccgggcgcttccgcgaggatcgcctcgcggtaggcgcgcttcagcgcagagcaggcgatgacgaggccggtgtccgcggcatcggcgaacgtccgtcccacggtctgcagccacggccaccggtcggcgtcctcgaggggtgtgccggatgccatcttggtgacgttcgcgatggaatgcagcgagtctgcatcgacgaacggcacaccgagccggtcggcgagacgcggcccggtccagaacctcacaatatggggaaccgtgagcccgacgaagccgatgggcccggcgaaggccacgctgagggcggtcaacagggcggtgctgaccattattgcccagcggacagtgttcaccgggacccccaacgacatcgcactgacgtctccaaatgcgaaagcgtcaaggacgtggcacaaagctatcccgaagatcagcgccggcacggttgcgacaaccagtgtgatcgtcgatccccacctcagccctgcgaatgatccgagggtccaggacagagccgaacgagccgcattcgactccccgaagaccatgatcatgaccgagactgctgctccgcacaactggccgacggccacaccggccaagatcgtccggccggcaggcaactcccctgatctgcccgtggccatcgtcagcaccatgaccaaggccccaacggcaccgacgaaagaggctagagcgtgtaatacaatcgtctggttgcccggtttccgggagacatggtggctatagctcagttggtagagcaccgcgttgtggtcgcgggggtcgcgggttcaagtcccgttagccaccccaagaagcaccccgcttcgggagtgaacatgatcgagatggatgccgcggcattcgaagaactcgtgacggacgagctcgatcgccttcccgacgacatggtcgacggcctcgacaacgtcatcttcgtcgtcgaggatcgtcccgaggacgggagcctcgatctgctcggcctgtacgacgggttcgccctcaccgagcgcgaccgatacgggcaaggcgagctgcccgaccgcatcatcgtgtaccgcgaacctcatctgcatacgtgcgacgacctcgccaccctgcgggatgagatccacacgacgctcgtccacgagatcgcccacttctacggcatcgacgatgcccggctgcatgtgattcttcttaaaacaaagtcatcacgtcacaaagctttctttcgtttgtatcttctatcgagtcggtatgtgttgatatctgagtcatgacgtctatttggatccgttggccctttccaagatagtgcatttgtccgacatatgtattgcattcccacaaaactgactgaattcttgtttggaactcactcgctcatgccatcacttccttcgtgatcactaatgtcgctgaaagcctcgggttcctcaatatctgggatgctttctgtttccatagtaacttcagaaccctcctcgtcactgtcatcgttatcttcatatatgatgggctgtatggcaccatcttcatcatcaccgtcatcaatagtctgcaaaaacataaataaatttgtcaagattcagtccaggagagggtgagaggggggacgtaattgagagattcacattccgcattgtccttacccctgcgtaaagccaataagtgacgtatgcgcgccacacttttgtgacagcacgacgcgtgtcccggcttcgatcggtgaaattgtttgattttccctcccacgcgtcatccgtagcgtgcctgaaccgttatccgtctttgcgttgcagtcctggcgggccttctcggccattgccgccgttgccgcatgaccctgagcgtcagggttcagtgcgcgttatcagtccgataactgacaaaactaatcagaccgatataccggcaataacaacccatatttttgtccatgaaaatggtccgcaaagatgatcccgcccagattagcccggcgatctaacggacgatcaagaaaccgttgaggccggctccccgccgcacagccatacccccttttgacaaagacaggagaacccatgaatacaaacttccgccgtgcgctcggcacgactctcaaggccagcgttgtcgctggcctgctggctggtgcatctaaaatgcctccacgtatatcaccggacgcaagcaaatatgttttttctttcgaaaatgtcatatagccgtaaacatgattaacgtaaaccattcgatcatcaaaaagacttttgcaatggtaccatagaggtggtaaatcatttgaggttaggaatttctcttcttctcttcgtttcatccattctaaaacacgcatttgaaatggtaaaagttccgaagaaagccttggatcgcgtgatacattggcgaaacgtaggctttttgccaattttcttgcacaatcgtaaaatagtgcagtgttaatatctaaacaagaatattcctcatcttcagacggaaggaacgtatagtctagtaaagcagtgtatgaggaagatgatccagatgaaagaatcgcatcttgaggggcaagaaaagagtcgagtatggaaatgccaaacgacaaaattaactcggatccttttacagtaacattcttcggacagaagaagattatgtaaacacttactcgagatctcacttatcagattccattgtggaagacacaattttttctgaagaattcgccatgatatacctgatccatgcataatatcaggaaaaatggatacaaatttttgactgctacttagtattggcaataggtctgaaaaagtatctaaaaatatcaaatttagatatttgtaccctgtcgaagtaaggaaccatggcatatatgtttggaatagattccattttgagagagttgaaaaagcactatctcgttgaaaggttctatacatctgccctttctcaacgcatttctttagacaaagactccattttttcctcttttcggatgataaatctttctcagaacatggagtgtgaatcaaacccatgtttgaattgaaattgagatactgatgcaagttcttcccttctgaatcagatagattcatatctgaaaggcttacgcccttgggacgaagtgtgagccttggcagcgaatgccccactgtcctccagcgcgaaagtcgtcacgctgtcgtggccccggttcgatacgtagaggtattttccagacggcgccatcacaatggccgctgcacggctattgcctgtgaagttcgacggcagagtggagacgacctcctgaggcttgagcgaaccttgctcaggatcgtaggcgtagccggtgacgctgctgtcgagttcgttcacgacataagcgttcttccctgccggtgtaaacaccacgtggcgcgggcccgagccttctcgtgctttgaccatgctgacctgggtagcaccatacttcgcgttgttctgctgcacgcggtatacgaagacaccatccagtcctttgtcggggatgacgaagaatcgtccggacgggtcaaacggaatcatgtgtggatgagagctgctttgctccactttatgcacgcaatatcttggacgcagaagccagctttgcgggggacgcacgtggaacggaattgtcttcaggtggcggtagtgctgactgcggcgatccttttgttcgtcggtctctcgggcgtgttgctcggcgtgaaatttcttcacggcattgagagtgcttctgtggacaattatttccggttcctgtccgcggtggctgccggcatgggctttatgtatctgcgcgccactccgcacatcgagcgtcacggcgaatgcatcagcacgctgaccttcctgattttcgccggagggctggcgcatctgtatggcttcgtcatgcgtccggcgccgacggtcgcgacactttgcgccctgaccatgtcattgatcgtggtgccgctgctctggctttggcagcgccggattgcgcgcaggagcgcgcattgatgcttgtggccaagcgtatcgcgctttttgtggtgatcggatttattgccctatgataatcctgaaaaaggttcagtttatattgtgcgtgggacaacggtgataggtcaaattgccttaattgatccattgcgagaggatgccattgccacagtgaaacaattgaaacgtcttggtaaatccgtacatatttgcaccggggcagatcaagctacagcagaaaaatatgcggcattattaggcattcccaaggataatatctgtgcgaacactgtgggggctgtcacgcaaaagggggaagtatccaaaaccagttatattcaacaattaaagcaaaaaggctttaaagtagctatggttggtgatgccgctaatgatgctaccgcaattgcctattccgatataggcattgctgttaaatcaagtatcggcgactccataaccgaacaacatgccggcatagtcgtacaacaagggttattatttcctatagcaacagcatttgatgtagcccaaaaaaccaatggcaactgaggtaaaaggaaataatccgtggtatttccagagacactgcttctgttgtgtcgtaagctacatcaatttcataatgctgtctctaggtgataaaaaggtgaagcctatacaaagttggaattgagaactccttcatctgcattgttcagctgtcttcctatgccttccctggatggttttgagtggaaaacaccccttgctataataggccataatggtatcttagtttcattgaagagagtaagttcagcctttctgcctctgctactataccctgaataatttcatctcaaaatgttctttgttgactataaaggcagtgacaaatttcatgtcactatttcataggaaaacctataattctttgctgtacttcattctgtagctaatgttgggtatcctcaaaataacagaaaacttttcatactgaaaacaatcccctctgtaatatccactgtggaaaatgacggaactgatcgcggccatgtcaggcggcgtgtgcccggagcacctcgctggaagcccagttccagggcaggagttcgtgcaggcggctgaccagatggtcgccgatgcggtcgagcaccgccgccagataagcctcgggatcgagacccgagagcttggccgtgtcgatgatcgtcatcgcgtccgcgatcacggcgccgccggcgtccgagccggcgaagagatagttcttcctgttatgacaatctatccataacagaaattggactaaaccgctacgcggtatcggcgctcttgcccgagaggtcgctgtccatcctgatgtaaatctctggatcggctgagttccgtcatccccggaggttccgaatgagccagcatggagggtctgcttacagcaccgtccctccggctcaggagctttcccatgacagcccttcggcaacgcatgctcgaggatatgcgggtacgcggtgaaaggctgccgtgacgtgcagaaaaccgacctgatccacaacgactacctgccccaaatcgacgtcgacccacagacctaccaggtcaaggccgacggggtgttgctgtggtgtgaaccggccgaatcattgccgatggcgcagcgttacttcctgttctgatgcggttcaccgttgccctgggcaagatggaaagggatttccgtcctctgcagtttcgcgcgttgcatcgcttcgctggttagcttaacgatcagcgctcgttcatctgcgatgatcgagggcaggcctgcctcgtaactgccgggtgacgtctcatccaggtccgtctgtgcactgaagcttgcgacagccgcatcccccagcgccttgcgttgcgccggcgtggcctgcagataccagtcaggcaagggtacatcggcttgtttgagttgggcacgtcgcggtgcggtagcagcagtgacccaggcccatcagagccatcgttaaccattggtcgttaaggcgtattctcaaaatccctatatctacagctgtggcaataggggcgtgatttggtaatatgccaatttgaccactattagtagataaaacaatttcttccacttctgaatcccaaacaattcgattaggggtcagtacactaagatttaaggtcatttcttcaaattgctctccatttctaagttcatagccttcgcggtagcttcatcgatagtacctaccaaataaaaggcctgttcaggaagaccatctaattctccggaaaggatcaattgaaatcctcgaattgtttctgctagaccaacatatttccctggagaaccggtaaatacttctgctacgaaaaagggttgtgataagaaacgctcaatttttcgcgctcttgctacgagtaaacgatcctcttcggataattcgtccaatccaaggatagctataatgtgattctgtggtgttttcccatgccgtggcgctggtattccagcccgaatccctggcggtcaagttcgccaaagtgccagcggaaatgatccaggtgctggtggcagaccgcagcaaattgttcagcggcggcacggcggcacgcgtgcaactggaccaggccctgcaccaatggccggccatcgtcagccgcatcgatcaacaattacggcaccaggcgggggatttcctgttcggtgagccttcgattgccgacttttccctggcccatcctttatggttcctcaaaggctcatcggtgaccgcaccgttggtggatgcttatcctgctgtggctgcctggttggatcgcgtgctgggttttggtcatggcaccttcacccagatgagcgccgagcaagcgttggacgtcgcgcgcaacgcgagccccgcggtgttgcccgatgaagtctttgaagacttgaatggcttcaaaggagcagtatagggctttgaattatcttcggtatcccagttagtttcactgaatcccccgtatgcaggggtttgtccccatgaggtgttagtgccattagcaaccataggtgtctgattagcattccaagctggagtcttagtaccattgttccaggacggagttttattaccagcattccatgcaggcgttttagcaccactattccaagcaggggttttgttgccaacattccatgcaggagttttatttccggaattccaagcaggtgttctactgccagcattccaagcaggagttttattcccagagttccacgctggggtgcgacttccagaattccacgctggtgtctttgaaccagaattccacgcaggtgtgcgacttccagtattccaagctggagtgcgtgaaccattcgcaacagcaggcgtacgggctccttgggcccagtttggtacatttggtccatcaggctcaacgccgcgccgaatttcgatgtcgcgctggacatcgatgtttaaaaatcatgctctcattttttgagcatgatcttttcggaaaaccggaccccacttttccggatcacgctcaacgccgcgcggactgtcccatttcggcggagctttttgcggcctcgacgaggctggcggaaatctcggccgtttgtgcggacgtcccccagctcggcgcttcgctgccatcgccccaggcacgaggacggtagaatgtgtggacgccgtatttccacatccttttcatttcgccgacccatgacggccgcacccagtaggcgtgatagtgcgtcgacttgccgacctcgggaagccagatcaatccgtcaagcgatgctttggcgatcttcttggcacgctcccacatgtcgggctcgtccaccacttccttcacattgtcgcaggcgaaggtgaattggcacgccagatggcgaggttggtcttcgggtcggcgatggaggtgccgtcgaccacgatgtcgcccttctggaacggttccagcgcgttgacgcacttgatcagggtggatttgcccgagcccgagggcccgcacaccacgatcacttcgccttttttgacatcagtgctgcaatcggtcagcacttggaagtcgccataccacttgttgatgttcttgatagagatcatacggcaaaccttttttgcagacgcttgaccagcagcgaggcggaaaagctgatgatgaagtagacgacaccggcaaagatcaggaactcattggagcggccgatgatgtcgccgttggagcgggcggagttgaggaagtccaccaggcccacggtgtagaccagcgaggtgtcctggaacaggatgatcgactgttgcagcagcaacggggtcatcttgcggaacgcctggggcaggatgatcaggcgcatggtctggccgcgcaattcggtgggccgggcgatcagcgactccctcagcagcatcggcctgatcctgctgatgacctggttgttctgggtggtgctcgacacggcgatccaggaagcgctgaaaccgccggtgaacaagcgctccaaccgccaaccgagcactcgggtaaaaaccatcctgccgctggtgcgtaacgcggtgaagatcatcctcgtggtgatctgcgcgatcaccaccatggccaacctgggcatcaacgtcgcgccgctgctggcgggtgccggtgtggtcggcttggccatcggcttcggctcgcagcaattggtgcaggacgtgatcaccggcctgttcatcatcatcgaagacaccttgtccatcggcgactgggtggtgctcgactccggccacgccggcaccgtcgaaggcctgaccattcgcaccttgcgcctgcgtgacggcaagggctttgtgcactcggtgcccatgatcggcgctgctgtcagtgccttggtgatggctgccgggatcacctgggtctcgcgggagtcgaagctgtctcaggatgtcggtatcgggctgctcttcgtcggcatgctgtccgtcggggtggtcatcgtctctcattcccaatcattcgccgtcgacctcacgagcttcctcttcggtgacgtgctgggggtccgcagtcaggacctgcttgctttgggggttgcgtgctgcctaggtgtgctggcctgcgtgctcctccgcaggccattcctcgcgctcgccttcgatgagcgcaaggctgcgaccctgcggatgcgtccgggctgggcgcatgcggcgatgctcgtgctcaccgcgctggcggttgtcgcctcattccaggtcgtcggcacgctcctggtcttcggcctcctcatcgggcccccggcgacggcatacctgctctgtgaccggatcggactcatcagccttcttggcgtcgatcagcgtcttgatcgtgaggtcgatttccttcttggtcatgttgcctttgtccgggtacttgtagatgcccttggcttcgaccaccatcgccgcgtccatgatgccgatcgaaggaatgttcaggatggcagccttgcccttgaactcgggattcagcaactcggcccagctgtcgatcgggcgcttgatcaggtcgggccggatgcccagcgtgtcggcgttgtagacggtggggatgagcgacatgaactgcgtgggcgtggccgagaacttcttgctcttctcgccttccaggtagatcaccttcttgggcgcagtgccctggtcgccgaccttcttgccgccgacttcacccttggtgaacagcgtggtgatcttgtcggcgttcttgatcttcctggtgtcgatgcccttcaggttgccggtgggcacgatcttcttgagcgagaagaattccgtggaggcataaccccaactttcaatatagaggttttaaacatggcaactgtttccatgcgcgacatgctcaaggctggtgttcactttggtcaccagacccgttactggaacccgaaaatgaagcctttcatcttcggcgcacgtaacaaagttcacatcatcaaccttgagaaaacggtaccaatgttcaacgaagccctggctgagctgaacaagatcgcttcccgtaaaggtaagattctgttcgttggtactaagcgcgctgcaagcgaagctgtgaaagatgctgctaacagctgcgaccagttcttcgtgaaccatcgctggttgggcggcatgctgaccaactggaaaactgttcgtcagtccatcaagcgcctgaaagatctggaaacccagtctcaggacggtactttcgacaagctgactaagaaagaagcgctgatgcgcactcgtgagctggacaagcgatccaggtttcgttctgcgtgttcgcgatttgacccagcagatattggagaatagtgcaggcagtgaagatatctcttcgtcttggcttggtaggacagtgtctagacctagactggatacagttttatcgtcgttgggtagcaaatttagtaaattcgtagctggagatcccaactttgatgttatgcgtccagctacggttgggccgggaccatttggaaaggttgccagtcaaaagaatttaacagttcaaacaaatactaacaatactgccatggaatcattttattccgacagacctacgtcttctggaccttcctaccaaaaccgaacgcctttaacaggccaggagtcaatgaatatgggagtttattcaccttatcgtcgtagcacagaaattgctgagaatatgagtatggatggcaatgcctatccttatactccagcttctcaagagaatccctataccccagatactacaccaaccatcacgggatgcgggatgcggaatgccgatgagagaccagggatcaggaactcgggatcgtttcacgctcaagtaggtccctttcgactgtcgtcctcataccaaaagccagaattcaattcaactcgattctgattcgatttgggtttcgagcgtacgagcgtacgagagaataggcgcgaggcgcatcgtggtgatcgtgtttcatccggcacctccgcctctcctctaagtgggagtggaattcatatccgagcgatacaagagacggggcgactcgcttatcaatcaaaccgggatggaggatggatcgacaccggaccgcgtgggaccgagaccgagaccgaaacccgatgacgcggcatcagacgggcgggcggcggatcagtcggtcgctgggtcgccgggtcgcgagggagataggcgaggggaaaggggggatcacgaatgtaccccatctggcgcagtacgtggtggtgatcgcggcgctgtgcgccatcaacctgctgacgacgccgcaccggctgtggttctactggcccgccctgggctggggcatcggcatcctggcgcatgccgccaccatttttggctggctgccgtttctgggggtggactgggaaaagcggcaggtggaaaagcgcctgggccgcccgctctgagtgcgcccccaggcgatggcccgcatacccaagggctaggcccaggacagtgccaggccgataagctggcagcctgaccacccccgtcgccgcacgcggcaccttccggagtttctggcatgcacatcagcgccatcccctttggcacgaccgactggtcgcgcatcacgccgaccgagcacccaggcgaacaaggctgcgcttactggcgcacccagcagtttggcgatctgcgcgtgcgcatggtcgagtacacgcccggcttcctggggccacaccggccacctgtgtacgaaggagacggcgctgtgatacttcgtcccggcatagttgcctcgctggtaccgtcctactcccgggttctcgacctgggctgcgatgacggtttactccttcgtcacttcatcaccaccagggactgcctaggcactgggatcgaactcgaccatccgtcgttggtcacagcgatgtcggccagagtgctcgcactggggttggacctcaacgaggatctgggagagtttcacgacgattcctatgacgttgtcatcttgtcccagatcttgcaggcggttgtctgccctgatgtggtgcgtgccgaaatggcacgtatcgggactgtgcttacccttctggtgctgaacgtcgtgtactggcgtagccgccttaagattataggtgagaagataccgattccccacgatctgccgtatccctggcatgacacccttagcccaattgctcatcaccaatgacagcaacatgaggaaacacataaatcggaacttgtgggttatccaaaggcttgaataaatgttggatctcgttggaagcatctcgtgtataccctgaataattcacggttttagcctgtcttttaggtacagaccagccaggcatggcctcgccaaggctttgctgataaagttggctaacagtcaatcctccttcgggaattgccgtggagccaactgtctttgaggcgcaagcactaagcaccaagacgctacctaaggctaaaatcatgtgcagtttgttgtaaatggccataatctaatactctcccattggtttctttatcaaggttgatggtttgtgtgacgtgaaatgaaagttgtgtcggtctgtatcgttgagatgctggaacaaaaaccatatcgaagctgccttgaatgcgtttttctagccaatcagcagctttaactgaattcggcttgttgaagatgacggaacccgattagtggcatccttcggtacgctcccagcaccagaatttaatcctaacagcccagcaactgtctcaggccgagcgcttcttaagcgagagacaatacatgttctggatcttgtggaagccacaaaaaccgattttactgagagcgtcggtgcgcagctcggcgtgcggacaatggttagcacgccaatgctccgggaggggattcccataggggtgatcaacgtaaggcgaaccgaagttcggcctttctctgaaaaacaaatcaaattactagagatcttcgccgcccaatcggttatcgccatagaaaacgtgcgactgttccaagaactagaggcccgaacccagcagctggcacagtctgttggcgaattgagagcgttaggcgaagtcggtcaggcagtaagctccacgctcgatcttcaaacggtgcttagcaccgagatacccgaggacgtccagcccttgccctcaaggatatcgaaggccgactgtacgacgctgttgcccacctggtcgggggacaacggttgcagccccagggcggtcgtcgcctcggcgagggtcagaccaccgatagaggcatgcgagaggtagggaaatgctgtcgccccgtgctctcccaacatgaaggcttgcaccgagtcgggactgacgccggcccagtcggctaggtgacggcgcagtcgggctgagtcgagggcggttccggtgccaacgacgaggttcgtcggatagtcgaactcggttgccgcgatatggacgttaacgtctagtgggttagtaatgaggatgatgggtgcgctgtgggtgtattggcagatgttgcccatcacctcgcggatgaccttcgagttgacttgggccagcgagttacgtgagtcatggccgccgccgtagctgtcaggcagaaaaatcatctttgcaacaggatgctgcggtaaattgaacaccgcccgacggctcgaaggtgagtcgcagtgcgaagggagagtgagagataggggtagcgtcggtctagacttggaccacctttgggagataagaggtactgggaagtcgatggcatgaagagagtaccgcgtttcactttcttcgaaggtcaagtaatacctatacagcaatcttcgccgtcgtgatggcctggatttttctgaacatgcaccgcatgcgaaagtgccccgaccgtaggccgaggaactgacattttcccagtcagagagggacatccaccgtatggatctcggagcgtcttgagcctgtggtagagaaagtatggcatcgacgcaagagtagcgacaggacgaaggtcaaagcgccggagtaaagttgctgactgcggacggacgagatgcgctctccagagttgggctgcggacaaaggtcgtcgcggtcgtcgccggatgtacgtgggatgtgactatcatccagctcgtccttgtcgtccgacgtccaagttcgagtcccaagtccaaatcccggtcgtcgtcgtaggttgctgtgttatccttccttcaggtgctcctcgccgtcgccgtcgtcgatggttctcccagtacctccctcccttttgtccctctcctgatcttcatctcgtccccatctcccatctcgctcccatcccgatcccaccgcccacgcccgcgtcccgaacctcacgaactcatgatcaagatcaagatccatatttaccttttttttcttctctgaacaactacttcgtctcttgatggttgccgggcacgaaaacaaagaagcaaagagggcggtccgtttctagcaggggctggtggggaatgggattgaaagagggggtgtttggatatgggttaggggatgggatgggatgggatattataggttacctgtgaagtccttgagttgagttgttcatgtccataattccacatgatccctatgagtcaaacattcttgagatgaagtagtattatgaagtccttgagttgaattgttcatgcccataattccgcatgaacgctttgagtgagtattcttgaaaacgagtattatcattgaagttcttgagttctaagttgttgagtctcgagtattgagttatagtaatggttaatgaaaaccttgaattgagtagttcacgtccataattctgtatgaactttatttcgtgaattcatttacaatatttttaaacttgttttaagacttgagcattgtgtagagtaagagtaaaagtgaagttcatttcttccaaagattatatgggaattacgtatttccaagagaaaaatgttttaacatttaaacaagagaggaaacaccgatttccaagagagcttttaaggtaatcaatctctttttcaattcctgaaagcttttctcacaagcttcagaccattgaaattttattgctttctgagtcaactttgtcaaaggagatgcaatagacgagaacccctctacaaaccttctataataaccagctaaacccaagaaactcctaatttcagttggagatgtgggtctaggccaattctgcactgcctcaattttccgagtatcaactttaattccatcaccggacacaatgtggcctaggaatgccacagactcaagccaaaactcacacttagagaactttgcatacaactccttatctttcaaagtctgaagaactatcctgagatggctagcatgatcttcttcattccttgaatagattagtatgtcatcaataaagacaataacaaacatatctaaataaggtttgaagactctattcatcaagtccatgaaagctgccggtgcattggtcgttttagctcgtcgctcaggcgttcgctggcggcggcgatctcctctgcagacaccttcagcgcggtaaccgtggttttatcaaacttcgcgctgtattcccgcagggcctcatcgccgcgtgctttcacgttatcgagaatatcgttaacagtgcgggtaatgctttcagaggcggaaatcgccgggcgcattaacagctggcgttgttgctccgcagtacagctattccagtcaatgattgtgttaaagctcatggcgatcactccatcatcttctcaatcggcaggaccagaattgaactggcacccagcgctttcagtttttccatggtttcccagaacagggtttcgctgctgaccatgtgcatcgctacgcgctgttggtcacccgccagcggcagaatagttgggcgttcggcacctggcagcagggcgatgacttcatccagacgttcggtcggtgcgtgcatcgggattgtcttcgtgaagcctgcggaaaatttccaggcgttttgcggcgttcatggggctgatgattccttgcaggcggtcagcggaatgtcagagcgggagcaggataaacccggacgctatcaatatggtgtcgtcagtggcacgttacaagctaccggttacccaccaccatgggcatctacctggcgctatgcttcttcaagtttgtgttgagcggcgtttagttcatccatgctggcttctggctgacgttgcagcttgctgagatcggcacgggcgtaggccaaggcagtttttaattggcgcagttggctgtcgatgggccgcttttgtaggcgctgcaaatccggcagaggttgttcggatatcgcttcggcggtatgcagggcctgatcagcagcggccagcgcagcgctcaatgttgccagttgctgcgggtccgcattctggtcctgggcctttttcattgagggcctcacaggtcgataataatgttgaaaatgaagcactaatgggattgtttgaaacgtttgtaaaaataaaaaaatttgaatacgaaagcaatgccttgctagtgagtggaactggttattacaatgtggttcttgagacgttgaagaagtcttcttcaaacattttgatcatgccctatttgaaggattataaaacaattgagaatgagagctcttcttctcctctgtctttgagttccatccgcttagctttgggtgattcttttaaatctttggatgagttgattcctttaataaagatggcccggatcccagttggagtatttttcacacgcaatcctcacaatttatcagtgaaaaaaattaggcctatcatacgtagtactgagtatggttcaccgaagaatgattttgaacaattagaaaaggacaagaagtcctttgatcaggttgagattagtgccattaatctgggtgccggtgccaccgttggtgatggtgctctcgccttcgttattgacgatggccttgtcaccgtcgatctggatacccatggactccggatcggtgacggtcatggtgcccttgttatccaccgtcgcgctgtcaccggtgatatcaataccgtgaccgccgccgctgacatccagatcgccgtcctgaatcactttcccgttattaccgttgatttccgtaccggtggaatctttaccgtcaacggtggttttgccattgttgtttactgtggcattatcacccgtaataacaagctcaccgttgtgattatattgccacttcgttgcgccatctgcgctcaccccttcaagggcaacagtgttattcgcttcatcaatctgccaaagattaatcgttgccttacgaccattgctatcttgcagagatatagtcccgtcagcattctcggtataagtgttcaccgcggtgccatttggtttctacaccaacaaactcaatgaccaatgggctatcggcttcggtgtctacgcaccgtttggcctggtgaccgactatgaaaacggcttccagggccgtggcttcggcagcaagagcgaagtgaaggtcatgaccttccagccaactgtcagctatgcgttcaacgaccgcgtatcggtcggtttcggcccaaccatcaaccggatttccggtgtgttggaatcggacaaaaccctcgaccctcgtttttccgacaccaacgtcaagatcaagggtgatgacaccgcgctgggtttcaacatcggcgtgctggtccaggccactgataccacccgcgtcggcctgacctaccattcgaaggtcaagtacaagctggaaggtcacacgaccgtcagcggcccagcccagactcaaggggtcctgcgtaataaccgttacgacgcctcctgtccagtgcgtggacatgatattgggcgcccagccgcttggcgaccgtgttccagttgcgagccgatccgaacagcccgtgcaggaccaccagatgcttgccctctccggcctcgaaaccggtcagcttgatgctcatcgatcaaatcccttgtttatgccggtgcctgcccccactaaattggcgcgcagcagggaaacccgaaatgccaatgatccgtataaccaatcgtctcgccatcgacgagcgtgagatcgaagaaacgttccagcgcgccagcggaccaggcgggcagaacgtcaacaaggtcgaaaccgccgtccagatccgcttcgacgccaggaactctccctcgctggacgacgagacgcgaacccgactgacgacgctcgccggcagccggatgacgaacgacggagtcgtggtcataacagcccagcgtttccgaagccaagagcgcaaccgcgaaggcctggtcatgcagttgaccccttacggcgttctggctctaatgaccaaagtggttgcaggttctaacttgcaagacatcatcaaactgggaagtttcgttgtcgcgtcctacctcggtctgctgattatgtttgcagtgcatggcattctgctgggcattaatggcgtgagtccgctgaagtacttccgtaaggtatggcctgtgctgacgtttgcctttaccagccgttccagtgctgcgtctatcccactgaatgtggaagcacaaacgcgtcgtctgggcgttcctgaatccatcgccagtttcgccgcctctttcggtgcaaccattggtcagaacggctgcgccggtttgtatccggcaatgctggcggtgatggttgcgcctacggttggcattaacccgctggacccgatgtggattgcgacgctggtcggtattgttaccgttagttccgcaggcgttgcccagcattctcgcgctgcccttccgtagtacttgggattattcctacgtctggagggcagtctttcgtcaaaaatccgccgtgaattcactcgccgatgattggcattgatgcaaaggtgataacgaaatgagaactgctgaatattcgatgagccagaaagtcctgcactgggtttctgccgtcatcattgtgtggtcgttgttgtcgggtttttatgtggccgtatttagcgttcctgccgccatcaaggcgtgggtcggtttttttaacgtgtcgttgaccacgttgtatatcccagtctttgtactgcgggtttattgctctttctcccacggcctggatttttccacccagcgctcgctgcaggagtacatggcgttattcgtccacaaggctatgtacctggtgttggcggtggtattggcgacgggcgtgctgatgatggatcggccgatcaatgtgtttaaccatctggcactgcctggttcacaagaacccgctgaagttaccttgcgtaaagtcatctccctgcctgccccgctgcgcggttctgcggtttatcgtcatggcgatcgcacgcctgcctggctgagcgaaggccgtctgcaccgtagcctggtatgtgagtgcgaagcggtaactgcgggtgaagtgcagtacgcggtagaaaatttaaacgttaatagcctgctggatttacgccgtcgtacccgtgtggggatgggcacctgccagggcgaactctgcgcctgccgcgctgccggactgctgcaacgttttaacgtcacgacgtccgcgcaatctatcgagcaactttccaccttccttaacgaacgctggaaaggcgtgcaacccatcgcctggggagatgcactgcgcgaaagcgaatttacccgctgggtttatcagggattgtgtggtctggagaaggagcagaaactccttaaataataaagatctttaaagtttaaacttgacattaattaattgatcgtttctgtggggcgcaggcctcataaaaaataactgaggtatcctagatctatataatttgtctggaaatcaaagtatccagaaacattttttaagtgtttcttaattaatgatacatgacgcatataagcataaataggttaaactgaaagactaacaagtcgcacagatatgtaaatagggttaaatgatccacattgaaacactaatttagtgtttgtatggaaaacaatgtgctcaatgagcgaagttacgccagggataacaggttaatagagagctaaagtacaaatcaaattctctgtttgacacctcgatgtcgactcaacctatcctccggttgtagcagattggaagggttagactgttcgtctatttaaaaggttacgtgagttgggttaaattcgtcgtaagactgattttgttatattgacccccccccaaaaggtctgctttttggcacctgtttcaattagaaacattaaggaatgaggcctaattctactttaaaaaaataaaagcctgttcaaaattcacttaaactgatctacatgaatagctttttagctattcacttttttagtttcttctctgaattttccctacattgaagatattgggatccacaaactgattttaaaaaaaatattttacacttccaaaaggataagctatttatgccattctcgttggttgttgctattccaacggacatttcaggacaccaacttcctatcaagtccgaactatcccttttcatttagtgatatttcttctttatattgatgacactgaactatgcaatagtcaaaatgattaccatgaatcctaaagaatctattttccatcatttcccccctttatactttgttttgacctattttcgaatgagacgcaactcgtcgtagacgtgggtgaaacctgtgagccaacgcaatggtcgtggcaacgagaaggaacgaagaaaaatgaatttaaggataacgctgctgttactgacgatcgtcactccgctggccgccgcaccgaaaccggtcacgctggtggtggatgatgttcctgtggtccaggttctgcaggcgctggttgctcaggcgaaccgtaatctggtggtgtcacccgacgtgagcggcacgctgtcgctcaatctgacacatgttccgtggcgacaggcgctgcagacggttatcaccagtgcagggcttgtgctgcatgaagaggggggcattttttatgtccatacggcggcctggcagcgcgaacagcaggagcgtaaagcgcaggatcgggcccgccgtgaactggatgctccgctgctctcgcagagcattgcgttttcttacgccgatgctgggtgccgctgctggcgctgtggggggaagccggcatcgcgcaatccgccgcgacgccgctcgatacatggaaaaactgggcgaccgatgtgcgcggcggaccggtcaattcgggacatttcctgacggaggaggatccggagaccacggtgaccgcgctgctcgatttcttctcggaggttgcgtgatggcactgcgtgaagcgcggcgcgaagatctcagccgcattcttgagatgctggttgacgacgagcttgggcgctcgcgcgaggatttgtcgattggcctcgatccttacctcaaggcgttcgacgaaattgccgccgacccggacaacacgctttacgtctgggaggaagcaggacgtgttgtcggcagtctgcaactgacattcattcccggtattgcttatcgcggcgcatggctggcacaggtcgagagcgtgcgcgtcgacagcacgctccgtggtctataaggagcaattggatgctcggataatgtactttaatgaatcattaaatttctttgttgagtgcctggccgccactttttcctctgtaaaagacgacaggtattggctaacaaaatttttactaccctctttaccttggcatagcatgcttaatgaggtagctacatgcctctttactacaaatggctttaccaacccgacaatcgacagcattgaagtgaatcgctcacatttaaaagcaattacagaacaatttgccaaattgatgatggcgcctttttgttctttggaaaaagagttacagggcaaaatagaaaaagtagagaatgagcaaaaaatagccggagaaaatgtgtatgccatgtcctcggaattggatatagtgatacacatgcagtcacaaagaaaattagccgcattgctgttccctgctcaaccattaagtatgttaggctttttccagggggccgtagtcaggccagactgatggcggaaaaagaatcgcaggcagccagtgctgcacgtattgctgcgcatgaacaggaagcgcgcgacctgcaagagcgcacggcgatggaaagtcgtgcccgccttcagtcggaacaaagacaaaagctggagcaggaagccaaagcccgtgcagaaatgcaattcaaggcagaatcagaactcacccgcaaagtgcaagtccaggcaacgcaactggcagagcagaccgaagtggcacgaggctgggctgcagagcgttttgctgcatcggaaagcgctcgtcacgaagctgctgagcgtgcgcgcgcagatgcccgtattgctgagctggcacgtcaccgtgaaatgcgcgaacgtgaagcccgtcagacggcagaaatgctggctaaagtgcgtacagaatccatgcaggccagcaaagaacgcgaacaggctgatgccaagggttcatgggcgtgtctaccgcagtggtggtgcggccccgccacggtggcggggcaggctggtcagcgctggatttcccggtcgcggtccagttcgtagggcagggtcagcacctgcaggcgcgggccttcgaggctgcccaggtgcaggttgtcgtctgccaccgcgtcggcgctgagcaccgcgagcagttcacagccggcgccgttgccggcagcaatgaccacttcaccgaccgacgaaccatgggtgggcgagaagatctcggcacctggggccgggatcgcctgctggtccagtgccaggcggtactggcggcgtttgagcttgcccaggtactgcatgcgggcaacgatttcctggccggtgtagcaacctttcttgaagctgacgccgtcgacggcctgcaggttgatcatctgcgggatgaacagctcacgggtcggccccatgacctggccgataccggaggttgatgctggcaggcgagataccgccagtcagctttgcaacatagttttgtaccgccatatcgacagggtgaatttcctggcgattgccatccagatagcaaatctggtgtttcggttcatcattattggctgtgctaacactgatgttttctgcggaattcgtcgtcatctacctgtccttttttatggctttgaattttcacaaacttcgttcattatcaaattgattcgaatcaatttaattgtgcatgtgcagcaatacactacgctcattattcaatgatgtcttcctggaaatgatgataactccgctagatgaccgcagaaatacgcatcagcaatgtcaggcatatgcacctgagaatactgtttttcgtataaatttgtcgcaaaaaaacaccaaaatcaaactacttgtgcaaagtttgattttaatcaatagtttgtcgatggcgtcatcaggcgagctaatacaatttaattgaaaggatgagttaatatcttcctggtttattatttagcattattgaagtagcaaaacaacctagcagtaccatgaatggccgctcaaaaatccccaatttgcccgaagatattgtcaattgtatcctattagagcttcctgtgaaatctctttcatgattcaaaagttgcagcaaatcatggcgttgttgtatcgatgacgctgacttcatcaagtaccatctacataaatcatctgtcgatactagtcgtcaaaaaattgtcttccttaatgttaatcctcaaggagaaacatggcaatacaaaattgtgtcaatagaagcatcaattagtggtgaatcaaaatttgtgtacctggacgagcccaataatatcccaggattctgtagtaactataaatatattgaagtgctttcatacagtggcttggtgtttatgatggcatacgagccccagacggaattgacgaaagaaaggtagctgtcgctcatagagggttccactcaatcctgccgagtaaaccgccccttgtaggagccggcttgccggcgatggcggtgcatcagtcacggaggtgtttgctgacagatcgctatcgccggcaagccggctcctacagggggtggggttgagttagttcaccggggcgttttcgctttggctggtgcgacgtttcgccgtcggttccagcgcttgcttgcgctgctgcaacgcctccagcaaaccgaagtcctgcgcaaagtcatccacctggatgccgtggtcggcgtattccacataacggccgagcaaggtgtcctcgtcatcgctgatcaagtccagcgcccgcgccttgacgcgccaggccgtgaacgccgtggcggagatcggcatgggttcgatcacgccttgcttgacggcggacttgagtcgcgcctgtacaggggagccacgtagcctccccgccaccgaaccactttccgtttaccccgtgactatcgacggcgacaacgttctcgtcgacgtcgccaatcccatcaccaaggagtcctgaaccaccatggcaaccctgcagatcaatgaccttcacgtcgacgttgagaccgaggccggtcccaagcagatcctcaagggagtcgacctgactatcaattccggagaagtccacgccatcatggggccgaacggttcgggcaagtcgaccctggcatataccctggccgggcatcccaagtacacggtcaccggtggttccgtgaccctcgacggtgaggacctgctggccatgaccgttgacgagcgtgctcgtaccggcctgtttctgtcgatgcagtacccagtcgaggttcctggtgtctccgtcgccaactttctacgcactgcccgcaccgctattgaaggcctgtcacttggacagctcgttgcgctccgccgaagacctgatcagcgacctgctggatatttcgcgcctggaaaacggcaagatcaatccgcagcgccagccgtttgtactcaacgaactgttcgacaccttgggcgcagagtttaaagcgctggcccaagagcaaggcttgcgtttccgcctgcgcggcagtcgcttacgcgtcgacagcgacatcaagttgctgcggcgcatcctgcagaattttctgactaacgcgttccgttatgccgacggcccggtgctgcttggcgcacgccgacgcaagggcgagctgtgcctggaagtgtgggaccgtggccccggtatcccgctggataaacagaaggtgatcttcgaagaattcaagcgcctggacagccaccagacccgagcggagaaaggcctggggctgggcctggcaatcgccgacggcttgtgtcgtgtgctcggcctgtatcacatctattcgctgacggtcagcgccctgatgggcatgcgcgtgggtggcttgaacgtgctgatcccgaacccgcgcgacattcccggcttcgtcaaggaattggccaagcacaagatcgtcgtcttcccggccgtcaataccctgtacaacgccctgctgaataatgcggacttcgccaagctcgatttttccagctataaagtgtgcaatggcggcggcatggccctgcagcgcaacgtggccgaacgttggctgaaactgacgggctgcccgctgatcgaaggttatggcatgtcggaaacctcgcccgtggtgacgggcaaccgcgtcgacatcacggaattcacgggcactatcggcttgcctttcccgtcgacggaagtggccatcctcaacgacgacggcgtggaagtgccgctgggcgagccgggcgagatcgccgtgcgcggcccgcagggcgataaccagcattgacttcttacgtccgatggcattcgccatagggccgccaagaatggcacctgctatttgacctaccacggaggccgtgttgatggcgctatagataccaaagtctcgctgtacaaattgcaaagcggccgcggtattagaaatatcataaccataagtgattcccagggctgctgccgtcaccgcaatgaagacggcccagctcgtctgactatttctcgtcgcaccagctgacccggaatcaccaggcttcatctctacgcgcgcatgaccattcgacgccataaaaccgctttctctaaaactgaattgcaaacctcaaccgagcgcctattgctcggtcaagacactaacgctacagctcacggccgtcactgcgcctctcagcacaccgcatcaggtcgtttccgccaccgaactcgccatcgtgggagctaggctctcattatgaacattgctaagcagctcagtaaagaacatttctttagataagaaaccgttggtcaagggcacaccggccatcgacgctgcagtgaccatcgtcaaagtggccgtataaggcaacagttgccataacccactaagcttacgtaaatcacgtgtgcctgactcatgatcgataatacctgcgatcatgaacagcgctgctttaaaggtggcatggttaataatatggaaaatagccgcagccacagccaatggtgatccgatccccaagagacacatgatcaagccgagatggctgatggttgaataggccaataaacctttcaggtcttctttaaagatggcaaaaaacgcagccatacacagggtaaacaggccaataaaggtgaccaaattgtggaacagtgccgcacctgcaaaaatgggtaacagtcgtgccaccaagaaaatacccgcttttaccatggttgctgacacatcacaaaggagtttctgagaatcattctgtctagtttttatacgaagatatttccttttctaccattgacctcaaagcggctgaaatctccacttgcaaattccacaaaaagagtgtttcaaatctgctctgtgtaaaggaacgttcaactctgtgagttgaatacacacaacacaaagaagttactgagaattcttctgtctagcataatatgaagaaatcccgtttccaacgaaggcctcaaggaggtccgaatatccacttgcagactttacaaacagagtgtttcctaactaatccatcaacagagacagaagactatatgagttagatgcacacatcacaaaggagtttctgagaatcattctgtctagtttctataggaagatatttcctattctaccattgacctcaaagcggctgaaatctccacttgcaaattccacaaaaagagtgtttcaactaaaagttttgcagacgctgcttgcgtcttacctgaaagcaacagtagccatagctaacgtcgtgtcgagcattcggttagcaaagccccattcgttatcgcaccagaccaacgttttgatcaggtgtgcgccactgacccgggtttgggtgccatcgacaatggcactgtgcggatcgtggttaaaatctacagagaccaacggcaattccgtatagtcaactataccatgaaatgcaccttgtgctgctttttgcagcaacaggttgacttcattggcttttacaggtttcttcaccgtcacgcttaaatcgattgccgtcacatttatggttggcacacgtaccgcaatcgcttcaaagcgatcgttaaattgcggaaaaaatcgtgtgataccggcggccagtttagtatcgaccggaatgatcgactggctggctgcccgggtgcgacgcaggtcaggatctgtcggtgatggtcggcctgctaccgttcaaggctttccacgggcgcgaaaaagcttttatcgcctgggttggcttgcgcggcgccgtaccgatcatcctggcggtgttcccactgatggccggcctgccccatgcgcagctctacttcaacctggcgttctttatcgtgctggtctcgctgctggtacagggcacgagcctgccgtgggtggccaaattgctcaaggtgaccgtaccgccggaccctgcgcccatctcccgcgcggccctggaagtgcacgtcaccagcgagtgggagctgttcgtctaccgcctgggcgccgaaaagtggtgcatcggcgccgccctgcgcgagctgaaaatgcccgaaggcacgcggatcgccgcgctgttccgaggccagcaactgctccatccgtcgggtagtacggtgctcgaagtcggcgatctgctctgtgtgatcgttgttggtgtcgaccagtgtcaggctttcgatttcggaggtcagccaggcggtgacccgctccttggccgcttccatgccggcatcgaggtagattgcaccgatcagcgcttcgagggcgtcggccaggatcgactcacggcgaaaaccaccgctcttcaactcgccggaccccagccgcaggtattcacccaggccaaaaccacgggccagcaccgccagggtctcgcccttcaccaggcgcgcgcgcaggcgcgacaactggccttcacgggcttgggggaaacgctcgaacagcgcttcaccggcgacaaaattgaggatggcatcaccgaggaattccaggcgctcgttattgcgccctgcaaagctgcggtgtgtgagggcaaggaccatcagttcctggtccttgaaggtgtagccgagctgacgctcgagacgtgctagagaaacggtcacggtttatcggtctttatctcgccgatggcaacggcgaattcaccaaggcgatcggcatggaattcgacggttcgggcaatggccttggcacccgctcgaagcgctattcgatgctggtcgaggacggcgtcgtgaaaaagctcaatctcgaagacagccccggcaaggtcgaggtctccggcggcgacacgctgctcggtcagctttgatgatttgccgtcatcctgaggtgtgagccgcggagcggcgagcctcgaaggagggcggcagtagctacgtcacatcgacttacaaaattgataccgtcatcttcgaggctcgcgacgctcgcacctcgggatgacggagtaattatctgttatccgccagtccgtcgcgcgcgagctggtcggcgcgttcgttctcggcgtgaccggcgtgacccttgatccagtgccagtgaacctcgtggatcttcaccgccgcatcgagccgttgaagtaacgccaaagaacatcctgatgatcggtcctaccggtgtcggtaaaaccgagatcgcccgtcgcttggccaaattggccaacgcgccgttcatcaaggtcgaagccaccaagttcaccgaagtgggctacgtgggccgcgatgtcgagtcgatcattcgtgacctggccgacgctgcgctgaagctgctgcgcgaacaggaaatgaccaaggtcagccaccgcgccgaagacgctgccgaagagcgcatcctcgacgccttgctgccaccggcacgcatgggcttcaacgaagacgccgcgccggcctcggactccaacacccgtcagctgttccgcaagcgcctgcgtgaaggccagttggatgacaaggaaatcgagatcgaagtcgctgaagtctccggcgtcgatatctctgcaccacctggcatggaagaaatgaccagccagttgcagaaccgcgtgcgaggcatgtccggctgaccattcaggagccgacaggatcggaagaaatctggtgcgccatgggcgggctaccctcaacgccggacgaactgctcccggtttcggagtatcagttgccactgcaggaggtgtcctggatcaggtttggcacgggcgggcaggctgagcctgacgatccatggccacaggcggtgacgcagcaaaagttttccagcgatcacgacgcatcggcgcacgcgtgctacaaggcggtgcggcgacggatcatgcgaatgtatggccggagccacctggcctgcattaagagtgctgcccttcacctcgcatggccgctttgcggaggtacgacgtcatcgtgttgtccggtcgccttggccttcctgcgatggcgttgcaaatgggaaggcatagggataccccgctccctgttacaacagcccgtgcatgggccgctcggccttcttttgggtgaaaaggcatgtccttttaatgcgctctattggaattttcttcaccaaaatcaagaaaaattaaaagataaccctcgccttcgttatgcctatatgaattggcaaaaaatggattttgataaacaaaagaagactatccataaagcacagcgaatattggcagacttggattctgccaatctctgatgtcttatttgatataacttgccacatagattgttgctaccgaacaccaagagcacagtactataccccatagccaatcaaggaatgccataccgacaggaaaatccttaaaaatagcgaggcaggtaaaatcataaattccataaataatagcaccaagaagcgcaccatataatgcggcataaggtagcgatgttttagccagcggtataacaaagacaataatactcaaggcaaaaagcagataaactaataaagcagaccaccatatcttgaatggggttccccgcaactagtggacacgtgatctagctcatgcagccagcgttagcacggcctcatgcttttcaccgcgttcctgctgaccgcgaagcttctgctcaaactccaccggagggagcatcccaggcttgaatgcagccggcggcggttatagaaatcctcaatccaccaagccactttctgtttcgcctccgtccgggttgcccaccggtagcggtcatagaattcgctcttcaacgtcgcccagaatgactcgctcattgcgttatcccagcacacgcccgtacgccccaccgactgcagcagatccagctcaacggccacctcatgcagttgggccgaggtgaattgcgagccacggtccgcgtggaacaccacctgccccggaatctgtcctcgcagggttcttgccatgcgcagagccctttccaccagatcagtgttctgcacgcggtgcagttagagtgattgatagcactactgagggtgctaggctagatgatatgggcactactgagggtgacctaagcgttgttctagcgagctcggggaaactgggcccacccgcttattgatagttcgtcggcgctatgggccacatgtttgcttcaccaaatccattactttttattgtttttgtgtgcattggggacaattacgcctatttttgttgggggtggtataaatggattgtgagtgatagggtgaaatctgaataacccaactcatgaatcctctcttggggttttcttgcctgtgttgtttttccccaagggactgtttaatttttgttgaaccgacatgtcttaggattgtatgtgtagaagtatgatacagaatgaagcatgatggcttataaaaaaatgatacccgtcagattttgggatgtatgctagaagttataggctacgattagtctagtacgagaggaccggagtggacgcagcactggtgttcgggttgtcatgccaatggcactgcccggtagctaaatgcggaagagataagtgctgaaagcatctaagcacgaaacttgccccgagatgagttctccctgaccctttaagggtcctgaaggaacgttgaagacgacgacgttgataggccgggtgtgtaagcgcagcgatgcgttgagctaaccggtactaatgaaccgtgaggcttaaccttacaacgccgaaggtgttttggcgaagagacgcgattttcagcctgatacagattaacagaatttgcctggcggctttagcgcggtggtcccacctgaccccatgccgaactcagaagtgaaacgccgtagcgccgatggtagtgtggggtctccccatgtgagagtagggaactgccaggcatcaatcaggaagaaccccgtaccataagggggttgtgacggtgacgggcacggtcgcgggctggaacttgttcagcgtgtaggtcaccgtaaaattctcggaagcggccaccgagaccgaacatggcgtcgtgcagcttggcccgagtgaggtcgtcgcgaccgcgcccggcggcgtggattcaagctgcagtgcaacctcgaccggcttggacttcaggaaatcccaggaaggcgtcgatgtggaggagcacccggcgagcatgacgcccgcggcgacaaataagaaaaaacgcatgacaaatccgtcgttttgatgcggtgcaagcccgcattggtccccgtagcccccgcgcggaccatacgggccgcgctaaactgacgcaaccgcaggtcgccgtttcttaacaaaaggttaacggccccggaaagtgggcgcgcaattttagcatgcaagatcaagcgattaaacagaggggggcgcggccatgatcgcccgatcgtcgacacctggtggcagaccgaaaccggcgccaccttgatgagcccgctgccgggcgcccatgcgctcaagccgggttcggcggcacggccattcttcggtgtggtgccggcgctggtggacaacctgggcaacattatcgaaggcgctgccgaaggcaacctggtgatccttgattcgtggccaggccaggcccgtaccctgtacggcgaccatgaccgtttcgtcgatacctacttcaagaccttccgtggcatgtacttcaccggtgacggcgctcgtcgcgacgaagacggctactggtggatcactgggcgtgtggatgacgtgttgaacgtgtccggccaccgcatggggaccgccgaaattgaaagcgccatggtcgcccacccgaaagtcgccgaagcggcggtggtcggtgtgccgcatgacatcaaggggcagggcatctatgtggctacgatgattgccaccgtccagaggatggcgcggcgtgcggcggtgatggactgttcggccacggcgcgcgtgaggaccacgcggacctcgccaatcttctcccgcggcgcgtcgcccggtggggtgtattcgatcgggcgcacccaaaccacgttgtcgttgctgtcgtaggggtgcggtcccttgaccgtggagatggtgccgtagttcgtcgctgtgaccgcgtattcgacgacctcggggttgggggcgagcgccgtgagttgttcgtcgattgctgtccggtcgatgttccacagtggctgcgccagcgaatgactcagcagatcggcgatccgcgcggcacgctgctccagcgcgctcaagcggcgttcgcgttcgtgctccgccacgacataggccgaactgccggcaacaagcgcgacaagcacggcaagcgccagcatcagcttggtgtgcagtcccttgatagtgttgtgcatgaaggtgggaaccgagttcggaacagcaaaatcaaccttggtttgaattatggtacatggggtaatcaccttatcaagaatgtgtctataatcacttaggaaaacacttttggctaaaggtaatgcaatttcaactcccattcttttcaagcatttatcaaatttgtcaacagaaggaggatcacttgaatccacagctatactagcaaaatttgtactccaaacatcatacttttcctcaatgtttctaaacatctcttccatctctgctatgtcgaaacctccctcgtaatcctccacgttaatgaacctgcacgattcaaaattaaaatggcataattacgagagtagatcggaatcgtttggtgtgagaaacaagaataaaaagtcttgggataaaaaaaaaatagtcattgtctagtttggataacttattccattatgtccacgacgacgcccgcggccttcgcgctcgcccgcccggcggccccggcaatgtcgtcgacgttcgcggccgccatcttggcgagcgccgcgacgtcgtccagcagtgcggcaagtccagcggacatgcgtgtacctcttcccgttcacccaacacacgtgtgcgggtcaagcgtacggggtttgcccgggagccttccccagcgactggcgttggtcccgcgagaagagatacgtgacgttccgatgccactcggttcgaaccactcggcgctcccgctggcgacacagaggtgctgctggatcgagactcgcgcgaatcagcccgtaaagtgtcgacatctcagtagtgtgtatgcagtttcgcaaattttcatccgggggcaacagcctgcagcccaggtttcgccctcccctgtgcactcggaggaagcatggatttcgcagagcggttgtccgcactggatatcaacactctcaacaaccttgctattcaacctaccatcccccacttagaagaaaacccaattaaggcaaacatgaaaaacaacaccatagaaacctcatcaagacattcatgaccataaggaactaaaacttaccggcgccttcattcggattagcttccttgtccttgctagcttggagagcatagaaacgaccataatttggaggaataagaaccgttccatctttagaagcttgctttgcctcccttcctctagccgtaaaagtaggacaatctttcaccttgtgatcattcttcccacaaccatagcatccattagtaccggctaggcacttcccatagtgcctctttccacaagtggtgcaagtaggtttagaaaattgagatccaccacctttatcttggttaaccttaggaacacttgaaaaatcttgatcttgagccctcttcttgaacctacctagagtctgtttcatcgaactcacattaaacaaaaatgggaaaggaaaagggacatattaacgtcgttgttatcggtcacgtcgattctggtaagtctaccaccactggtcacttgatttacaagtgcggtggtattgacaagcgtaccattgaaaaattcgagaaggaagccaccgagttgggtaagggttccttcaagtacgcctgggttttggacaagctcaaggccgagcgtgaacgtggtatcaccattgacattgccctttggaagttcgagactcccaagtacaatgttactgtcattgatgcccccggtcaccgtgatttcatcaagaacatgattaccggtacttctcaagctgactgtgctatccttattattggtggtggtactggtgagttcgaggctggtatctccaaggatggtcaaacccgtgagcacgctttgcttgcttacaccgccatcatcaaggcgacaaagctggcgagtaagcggatcaggggtgacatgttcgggtttcctgcagttcagcgattgatcttcaggctaaagccgattgactttctgtaaaattgaataatagtgagtaacttgttcagttttggagaaaggtatggagttcagtcaattgcgcattttccaggccgtggcagaagagggctccattacgcgcgcggccgagcgcctgcatcgcgtgccgtcgaacctgtcgacgcgactcaagcagatggaggagcaactcggcgtcgagctgttcgtgcgtgaacgccagcgcttgcagctttctcctgcgggcaaagtgttgctggactacagcacgcgcctgctggccttgcatgacgaagcccacggcgcggtgcagggcgggcaaccggctggcgattttgtactgggcagtatgtacagcacggcggcggttcatgttgatggttgatgcacagtgtccgttcctgtgcaggttgttcccttgctatttttgtgcttggattgcaatatgaatttcattaggcttgaatagaggggttttccaatcttgtttcattgccatttttgtgcttgcattgcaatctgaatattatcagggttagagagagggtttttcaattttgtctgtggcattttctagtgggctttgttagctttgcacgcaactcttcccttcattcatttgcttgcagccattgggtcttacaaaggagtgatttcttcttttcatggaggtaccttatttgcccatatgtgttgaggtcttgttagacagtcttttacgagtatagataattttcaatttttctttcctattgactcctttgtctttgtcataacttctgttgcatggtagtttctcaattgggatattattttcaccaatgtatgttgtattcgatctatacggacctgacgctgacaacacatcaacaggagcagatccgcaaaatgctcgaatcagcatgagggaacaactttcgggcgcaaaaacattgccggaagcgccaccagcgccattacccagaacacgccgtggcccagatattgatacaggaaaccggcgaaaacggtcatgatagcgatactgccgcccatcgcgacggcagagtaaaccgcctgtaaacggatgacttcgctaccctggcgagcagcaatataacgcatggcggccaggtggcagaccgtgaaggtgccgcaatgcagaatttgcaccactatcaaccacggcaacgccgtagttgctcccataatgccccagcgcactacgccgcaaatcgccgagatcaacagcatatcgcgtgcactacaacggcggaaaagtttattactcagcgcaaagataatgacttccgcccccacgttttttagggtttagggctttagattttttaggtttaggattcttagggttttatcggtttagggtttcttgcttacattttttgtgtttttagggtttaacatatacgatttagggcttaatagggtttaaagcttagagtttttctagcttaagggggttttgggttttttagggtttttaagtgtttagtgtttcttatggtttttaagtgtttagtgttttttaaggttttttgtgtttgtaagtttagggtttacagatatttaggatttaaggttttgatcttagtctttgtagttgttttaaatgggttttaggggttttatagggttagtacgatttatggtttcttaaggtttatggtttagtgtttcttcggggtttgagtttaggatttgtgttttggattcagggtttagggcttagggtttcattaggtttaaggatttagattaaggccacaagattaataacgcgtttaaatctttttataaaagaacgtaacttcatgttaacgtttgacttataaaaatggtggaaacatagattaagttattaagggcgcacggtggatgccttggcactagaagccgatgaaggacgttactaacgacgatatgctttggggagctgtaagtaagctttgatccagagatttccgaatggggaaacccagcatgagttatgtcatgttatcgatatgtgaatacatagcatatcagaaggcacacccggagaactgaaacatcttagtacccggaggaagagaaagaaaattcgattcccttagtagcggcgagcgaaatgggagcagcctaaaccgtgaaaacggggctgtgggagagcaatacaagcgtcgtgctgctaggcgaagcagcctgaatgctgcaccctagatggcgaaagtccagtagccgaaagcctcatacgggccaagtcaagattggctgagattttatttttggcatgggacgtttgcgccagcttcagccaatcttgacttggcccgtatgagtgcttcgaagtcagaatctcgacaatgtcgcctgtctgcagcttgtaatcaagcggcaccattttgccgttgactttggcgccgatcgtcttgttgccaatttccgaatggatgcggtaggcgaaatcaatcggcaccgagccggccggcaattcgatgacatcgccttttggtgtaaacacaaacaccatatcggagaataaatccatcttcagcgattccataaattcttcggcattgcttgcatcgttttgccattctaaaatttcccggaaccaagaaagcttttcttcgaacgaattcggcttaattgtcttcccttctttatacgcccagtgagcagcaattccaaactccgcgatttgatgcgaccaagccagatagagctacgtgccaacgacgctcaccgaggcgatcggaactgcgtccaatgaggatcattccgattgcagcaaccgccgaaacagcaccgcttaagaatccggtcatagtcgcggtgcttgcgccaacgcttttcagcagcgttggccaccagatcgctatcgaggtcagcgagaagtagaagccaaggtaaatcagcgtgaatagccagacggtcggccttcgcaggacctcgccgaaatttaccggccctttcgccaccttgtttgactcgtctaaatccgtctcgatagccttcttctcagcttcgctgagcctatccgcatcccgcggccgatcagacaagcagagatagcaaacaaaacccattactattgtcggaagtccttcgagcaagaaaacccactgccaccctcgaaggccataaacattgtgaaggccgtccattatgatcaacaactatttccttgttcaacagatttttcagctctaccgcagtcacataaaaagctcctccatgccatgaaatcaatggtcttgcttcaatactggcaccgtaaaaaaggcttacttgttttcgggtttgcataggcacacgccccacgccatcagggatcaccaacagtctttgtggggcatacaaggattggatggcaaagcgcgtcagtgttacagcatttaaatccagaggattggccacttcttgaggagagctggtactttctttggactccaaaagcacttctattggttttacatcatgagttttatcattaacgcttaagtttaagataatgacctcaccttgaggcatgagctgcaccaagagtcttttgtttttaaaaacgtccttgcctttcagatataaagcatcctgaattttcaaaagcgcggtttgggaagctgcttcatcttcctacctggcagataatggagttaataccgtggtcatttcaactctgatgacaatagcaggtttaggaacactgacaggcacaatattttttggttttgttggtgataagattggtgtaaaaaaagcctttgtagtcggtctaataacttcatttattttcctttgtcctcttttttttatttctgtgaaaaactcttctcttataggattatgtctctttggattaatgtttacaaatttaggtattgcagggttggttccaaaatttatatatgattactttccaacaaaattaagaggattagggaccggtcttatttataacttaggggcaactggaggaatggccgcacctgtattagctacatacatttcaggatattatggcttaggtgtttcattattcattgttacggttgcattctctgccttattaattttgttagttggttttgataaaacagatgcgcgcgtttctcgccgtggcccagagcctgagttttgccgccgcctgcgagcgcctgcacctttcccaatcggcgctgagcctgaccatcaagggcctggaagaaggcctgggcgggcgcctgttcagccgcaatacacgcaacgttgccctgacgcccgagggcgagtccctgctgcccttggcgcgccggctgatcgccgactgggacaacgccgaagacgaactgcgccagcgtttcaccctgcaacgcgggcgagtcaccgtggcggcgatgccgtcgtttgcgggcaatttgctgccaccgatcctgaagatattccgcgcgcgttaccctcaggtgaatgtgaccgtgcatgacctgatcaatgagcaggtgctggagatggtgcgcgaccggcaggtagagttgggcgtggcgttcgagccggctgagggttcatcactggcatttcaataagtgatggcttccattgttattctaaagtgtcctgagacagaaagcatttgaagttcatggttgttgagaaaggaaaggttcaaaagcaagtaatgtccagggttggcatggggctgtctgtctgccaggtgatgaagggtaccaggaaagctgggcttatctagaccaggggacaggactatgtgctcatgagaggcaggcaggggcatccatgagcaacgggggcacttggggcatcctgtccattagactccctcactctagctgcctgcaggaggacatgcaggcccagtctgccagcgcagctgacttttgcaaaagcagccagaaatccagtggaaaacaattcatttttacaagcaaaacacaaatgagagcaatcaaaattcatctgtaggttgggaggggcccagtggtgtagcccaagcttcttgggcagtgtgggcagaaggacccataataaacactggccgggcgcggtggctcacgcctgtaatcccagcactttgggaggccgaggcgggcggatcacctgaagatgggagttcgagaccagcctgaccaacatggtgaaaccccgtctctactaaaaatacaaaattagctgggtgtggtggcacatgcctgtaatcccagctactcaggaggctgaagcaggacaatcacttgaaaccgggaggtggaggttgcggtgagctgagatcaccacactgcactccagcctgggtgacagagtgagattctgtctcaaaaaaataataataataatcaccaagcccaacatgagtaaaaaatgtgaacacacacttcaccaaagagcagatataaatggcaaataaaaacatgaaaaggtgcttaatatcactagttaatatggaaatgcaaattaaaaccacaatgacatatccctacacaccaccttgtagatcagatcgcgtttactgcgcggcaacttcttgaccacgctcttcgctgaagccctgacggcttcgtcggtcccatggatacgtgccgcgagcagcagcacgagcgtggcgtcagtaaggttcatggcaagacccaaaaaataggcaccgtagtgtaccgactcttttctttttcgtaccagccccaacaaaacgatgtgtagcagtatcgatatcccgattgccgcgcaaagggacacgagccaaaaaggacgggtaagggttggaagggaatggggactcaagggtaagagctctatccgaaaaggctaaaaggccactgacccagccacctcccggggtcacgatgctcagtctgtttcgccacaaaaggcagaagccacctccgccaccgaccatcaacgtcgccgaaggctacctacccgttgagtcggcccacagcctgttagcggcggttggagcggtgacaatggtgacccggacaactggctgaacgtgctgttcggctgcgactcgctggccggtaacaacttctccaaatggtgcgacaagaaattcgacggcatcgtaaaagaagccaaggccacctcggatgtcgccaaacgcaccgagctgtacaagcaggcgcaacatatcctcaaagatgcagtcccgatgacacctatcgcgcactcgacggtgtatcaacccatgcgcaacaccgtgcaggacttcaagatcagcccgttcggcttgaactccttctacggcgtgagcgtcagcggcaagtaaggatcattgacggcgacgtttcataacgtcgccgttattgcatccgcccggaccgtaggacacagaccacattcgaaatcgttgcttcctacagcaatgagctgcgatgtgcgcctccgttgcctacaaggtcaatccgatttgttctactttcatacccagcgcggcgtagacggtttgaccgccaatcgccgagagttgtgtgaactgttgtggtcgctgtggtcgccgtcctgggccgaggggccgggcctgtatgggcagaccgcgccgtcgttcgataacccggattttgtcgaggtggtgattcactcttatcgccaccgctttatgtacgcgccgggcgacccggcactggaagccatcgagcaggcactggcgttgcaaccggcgatttcggtgccgagcatttcattgtgcggcgccgatgatggtgtgggcccgccgcccgaggaagatgacgacgtggagcacttcagcggcttctatagccgacgggtgttgcccggcgtcggccacaatattccgcaggaagcgcctcaggccacgctggatgcgctgctggaattgctcggtgagaagcgctcgcggtaggcctggggcgatggcagtgtttctaataaaaaaagcattgcagcagccagagaagcggagcagaagcgtaaggaaatggaaaacagaagaaggaatcaagaattggaagaatttagtaaactgcctttttccacggttcctgaagcgttatcgttttttatcgcaagaatggagagagatgaaagtattttagaatttttgcagagacaaagtggtaacaaaaaatcgtataagaaaaagaaaaataataccgcagagggcatttctcctgaaaggaaaagtgctgacgcttttcggaaaaaattaatagaacttataactgctggtctaacttttctagaggataaaattggaaaggaagatatatactcggaaactagagaatctcttcaaagaatttatcaaaaactcacgtcaaattcatggtcttctcctgttagttacgacgactcaaattcttcacagtacaacactttaatctatccattactttcagtttcaattactggattgttaatggtgtatgtctttaatccgccagcagcttggttaaatcatttgctactaaatggtttaaatagtctgtcaggctctaatattatgttacttggtcttgtgattggagctatgatggcaattgacatgggcggtccatttaataaagcagcttatgtatttgctactgctgcattaacggaaggaaatgcagctcctattactgcagcgatgattggtggtatgattcctccattagctatcgctacagcaatgttaatctttagaagaaaattcactaaagagcaaagaggctcaattgtaccaaactatgtcatgggattatcatttattactgaaggtgccatcccattcgcagctgccgatccattacgtgtgattccttcaatgatggttggctcaggtgtggctggagcttgatcatcagtacattgctggtcgctgcattggcgctggtcctgcaaagccatcaacgggccaacgacctacaaaacagtaaccagcgcctgaataaagagatcgcccaacgtgagcacattgaacacgtgctgatagagagccgcgaacgcttgcaactggttatcgacatgaccgactcaagcagcgatggtctatttatcgtcaatcccgataaccgtgaaatcctttacatgaatcgcgccacctatcgctcgcttggttacagcgccgaggtgttcagtgacttattcaaagagaacccagaccgtttattacctaactttactaactggctcagcgaactgcgtaagtctcaagacagcagctcctcgcagatgtcacagcaccagttactccgccgcgacggcagcacgcaaccggctgaaatcagcgcacaactggtcgtgatcaatgagcaccggtgatgctggcgggtgtggtgtggtttatcgtcacctgtctggcaatattactggcgcaaaacattgaacaattcaccctgttgcgcttcttgcagggcataagcctctgtttcattggcgctgtgggatacgccgcaattcaggaatccttcgaagaggcggtttgtatcaagatcaccgcgctgatggcgaacgtggcgctgattgctccgctacttggtccgctggtgggcgcggcgtggatccatgtgctgccctgggaggggatgtttgttttgtttgccgcattggcagcgatctcctttttcggtctgcaacgagccatgcctgaaaccgccacgcgtataggcgagaaactgtcactgaaagaactcggtcgtgactataagctggtgctgaagaacggccgctttgtggcgggggcgctggcgctgggattcgttagtctgccgttgctccttaggggtcgactcacccagccccgattaacgttggactggaacccttggtctttcagcgtgcgagtttttcactcgcattgtcgttactcacgtcagcattcgcacttctgatacctccagcatacttctcaatacaccttcatcggcttacagaacgctcccctaccacgcataataaattatgcatccgcagcttcggcatatagttttagccccgttacatcttccgcgcaggccgactcgaccagtgagctattacgctttctttaaagggtggctgcttctaagccaacctcctggctgtctatgccttcccacatcgtttcccacttaaccatgactttgggaccttagctggcggtctgggttgtttccctctccacgacggacgttagcacccgccgtgtgtctcccgtgataacattcttcggtattcgtagtttgcatcgggttggtagggtcaggatgacctggcgtgtatcgcgttaaccccgcgtgaaccgcgcagataatatgctgctcggcgcggcgacgctgcaaggcaggacagagcgacgtcagtggacggtaccacggaatacgcagcgtgggctggtgcttgagccatttaccgcctaaaaatggggtgatgatgtgatgcaggctggccggatcaccgtctgccagctgcagtgcgctctggtaatcccctttctccagacaggcatgcattagcggcgcgctcagttcgctggtggtcgtcagacaatgcagaatggcacgatgcccgcgtcccggctgggcctgccagcttacccagccgctctgcgcgagctggcgcagcagggtacgcgcgtggcgttcactgcacagcgcaacctcagccacttcagcgatggtggtgggctttggcacagcaccatagtgctgataaagcccgcctaggctgaagagatcctggccgaccttgtattccagatcagaagatttgtaactcgcgatcacacatggcgatcccggctggcaatgcccgcacaaaccccggttaacccgggcgaagcaagcctcacaacccggtggctgctttgtcgtgccattccccggcatcggcatacgggcgttcctttccgcatcactgattgtgtttgcggttccccggggaactggggaccggagcacgccgagttgcagaccttcgtatcggccatgggcgtgatcccgcgacgctcggatagtgctctccaaataagacgcttggctcggagtcatattacagtcctcgatctggtcggtttcacctggaaggttgaatccatctgaccaggtcgcccggctcagccggccgccttggcggcgcgacgccagcggagattggtcaatccagccgccctcccggtcggtttggtcactgtagtagtgttgttttcaggtgcatttcaaatataaaagtaaggggacaagagatgagtaaaatgccaaagagcgcgcgaattcagaatacgacgcgtacacactttaatttaagcccggtcgcaaaaggctgcgcggtattagtcatgggattggcgaatatggcttatgcgcggcaacaagagccggccaataccgtggttgttaccggtattcgcagcggtattgaaagcgccatttcgctgaaaaaagattcctcctctttggtggaagcaatttctgctgaggacattggccagttgccagatcagagtatcgcagaatcgatagcgcgtttgccaggccttgcggcgcagcgtgtcgctggtcgtgcgcaggcgatcagtattcgcggcttgtcgccggatttcgcgacaaccacattgaatggtcgctcgcaggccagcacgtttggcatcgaactgcaggaacagaaggcacgcaccgtcagcctgttgctgttcgccggcctggcgctggtgtttgcgctgttgctgctggtggggttgtcgaccttggtaatgatcctggtgtgggacaccggctaccgtcttacggggatcatttgcctctgcgtgttctacaccctggccgcagcgttttgcggagtgcgtttgaaagcggcggtattcgatgaatccacgccgttccacgccactctcgaagagctggccaatgaccgggagcgcctgctgccatgagcctgactgagatgccgaaaaacacgtcacggcgggaaatgcgcaaggcgctcatccgcctgcgcatggaaatgcaccgtcaagagatccgccacgagtctcagcaactgctggtgccgctgaccaaggtgcgcaacctgggtcaaaactggcaggacagcctgggcactcaaattgaatcttcaaatcaagagtatacggcaacagtggactcaatgaatagtcgaatacttgaactttctaatgatcttcgagttgctaattcaaagctatctgagtgttccgatgatgttcgtagacttactctacaaaattcatttgatttgagggagcatcaaacattggtgcttcaacttcagtctaacatcactgagttaaaacaagacataacattgcaacgcaccgtgcgaaatcagttagaaatacaaaccactgagttgaaagagcgcttaaagtttatggaagaacggcatgagaacttgcaatctaaattaatcgcggctaataaagacacgacacaaaatcctgataatgttgaagtcgaggctttatctattgaactggaaaggacgaaggaaaaacttcgcatggccgagcttgaaaagagtaatattcaacaaaaatacctgtcccttgtccctgtctgttttttgactaaatttaagcatccatcataacatgcttaaacggatgttccaaataatttttccaagcgttttaccaatttcatgagaggcaacttaacatcattgtgatctcggcagtttgcaatttctcttaataacgatatgaaggggattttatgaaaattttcttcctaccactgaaaactatcggattttcgtcacagccttagcccccggatttttgcacctgtggggcttgccaatttgtatgcttttgtatggctaaatgtagaatagcgtattgtccaaatctgctaaatgaattagtgatgcacggaaggaatcgttttacaaagatttatgagatttttaggaaattcgaggtaagaagtgtaaagcggtaaaaatcgctgggaaatgtaaaagaaattgcttgtgtatgaatacttgatgccttctacggcttgaaggtcgatcagggcatgggcaggacgcatggcggcaggcttctaggcggcagagtgaagaaaaaccggcaccgaccaacaacgtcggcgccgggagagggatctatgtttaaggcagcgcggccacgacggacagctctaccaggatttccggttcgcacagcttggcctggaccgtggcgcgagccggggcgacgcctttgggcagccacttgtcccacaccgcgttcatgccggcaaaatcggcgtcgatgtctttcaggtagatcgtcaccgacagcaacttgcttttgtcggtgccggccaggtccaacagacgctcgatgttggccaaggtttcacgggtctgcttttcaatcccggcactcatgtcgtcgccgacttgccctgccagatacacggtaccgctgtggacaacgatctggctcatgcgctcattggtgagctggcgctgtcgtgaagaggtcaacgacctatcacctcgtcgtgaagttgcacccaacgccatgaaggatcacaagccctcagactgtccgtgaagctacacatggaccgtgaagttgtccgtgaaaggaacttatcaacttttaattttttgttcaacttcaacaaatcatagatgtcatcacaaaatgatttaggtggctcatgacttatcaaattaaaggtctttgagtcatctttccaactccaccaactttgcctaatttcaatctcggagtaacaagttgtgcttgttttagtgaagccctgtcaggcagagcaacatgacgacccactagacgggcggtgatgctttaaatggccagtgaagcaatagatggctcgtgagattggccgttttaggcacgtttttagttttaaaagttgggttcattttggtatttcctcctatgtatttagtacttaaacttgcaggtacgcggcgaatgcgccggacaattcgtacaactcaccgtaggtgattgtcttgcccaggttgctgaaagccggtttgttggcgaagcgctggcaggactgtttcagtaccgtctgaatattcggatactcgtctggattgatctctgaagcaatcccggcggggtacttatccttccaaaagtcttcgttcatggaagcccactcctcagcgacgcgaattcatcatcgcatttgatgcgattattattggtgtatgtttttttaggtgagtctggcgctttcaagcaggccgagatgtcacaaagcgcgccgagagtagcagctttgccaaaggccgcctagagccaaaagcgggccctacagtcataatcacgactgtcctacaatatctggtcacactttaaactggcctgaaatggcctcatggaaggctctggaacgggctttacaactggcagtacgaaatcaaattcgacggttatcgcatgctcgcgcgcattcaggccggcgaagtgcggttgtttacacgtaacggccacgactggaccgaacggctgccgcgtcaagccaaggcggtgcgcgccctcaagctcaaggacagctggctcgacggtgaaatggtcagcctcaatggcgacggcttaccggattttcaagcgctgcagaatgcctttgaaagtgggcgcagcctggacattgtgtattacctgtttgatgcgcccttcttgaatgggctggatcagcgccaagcacccattgaagcgcggcgtgagaaactcaagtcagcattggccccgagcaaaaacagcctgctgcgtttctccgaagccttcactgcgccccctcgcgacatcatcgaaagcgcctgcgcgcttaatctggaaggcgtcgtcggtaaacgcttgggcaccctggacgatgtgccgctgtttgtcagcgaaggcaacgtggaagagaagctcaagaccatccgcagctcggactatctgtcgttctgttatgagcaactgctcagccatgagggcgcactgtgcatcttcggccatgatttggggccgcaggatacacacctggtggatgcgctgcgccaggccaagctgaccaccctggcgatttcggtatcggggcgcagcgacgggtttattcgtcagcagaaacgccggtatgcggcgttgtttgagggcagcggtgtggcgctgaagttttttgcggcgcgcacgcatccgctgggtaattcggcgctctcggtgccggtcgagcgctgatcacctgcaaccgagcaggtcagctgtgggagcgggcttgctcactcccaccctgactgtatgccagcctgcaaacacggtcactcttcggcgctgtgcacacacctgaccgtcaacgtcacccacctgcagcagactgccaccggcaagctgctcggcacccgcagcctggtgggcaaaggcgaggactggaccattggcggtagcgtcgccagccaaggcacgctcgacctgtcggtgaccagcctgctcaatgaccatggcctgatcttcagtggcggcgacatgggcctgcgcgtggaacgcctgaaaaacctcggcgccgcgatctatgccatgggcaacctgcgtatcgaccgcgatggccagggcgggcgcgccgagagcatcatcaacagctcatcaagcatcgagaccgaaggcagcctggtgatggctgccgggcgtatcgaaaacatccgcacggtactcaccaccgagtccggcatctacagcgcgtcgatcacccccaccgcgtgcatcttcggtgtgacgggcagcgactgcgacggcggcaaggcaatgtccccgacgattttttccgccctcagcgtaccgtttatcgtacagttttcagctatcgtcacattactgagcgtcccggagttcgcattcacactgccactgatatccgcatttttagcggtcagctttccgtccggtgtcagggaaaaggccggaggattgccgccgctggtaatggtgggggccgtcaggcgcttcaggaacacgtcgttcatgaatatctggttgccctgcgccacaaacatcggcgtttcattcccgtttgccgggtcaataaatgcgatacgattggcggcaaccagaaactggctcagtttgccttcctccgtgtcctccatgctgaggccaatacccgcgacatctcgtatgccgtcttctgcttgaaaaaaaaaattcaatcacatatccgcatgctgtctcttatccacatcgccgagcccacgagacccatcacagttaaatcaatccatggccagcagcggcctgtttcccggcatggcgatccagatgacggcaatcggcgaagagtcaggcaccctggaccacatgctggataaagtcgccagtcattacgagactgaggtagacaaccaggtcgacaccctcaccagcctgatggagcctctgatcatggtggtattgggcgggattgtcggggcacttgtcatcgccatgtacctgccggtgtttcagttggggagcgcattttgagtgcgctgctgagtgaacacccgctggccttcgtgctgctcgcgttggcattgggattgatcgtcggcagttttctcaacgtgctggtgtggcgcctgccaaagatgcttgagcgcgaatggcgcgcccaggcccacgaagtactcggcctacctgcagagcttgccggcccgacctacaacctcatgcatcccaactcgaccggtctcacggccggcgccgaatacgacgtctcggtgcaggcggtcggtttcggccgcgagggcgaacgtgccggcgccgcgctgcggctgcccgaggtccccgccgacgacgcccgcacggcgccgggcgtggcggtgctcagctcggacgagggctgggacaccgggctgaaggacggcaccttccgcgtcacgatgaacctctggtggggccagaacggctcgctgttcaagctgttccgcgacggcgagctcgtggggtcggtgccgctggcgatgacgagcgggccgagcgcccagcaggcggtcgtcgacgtcgccgggctccccaacggcacctaccgcttcaccggagagctcgtgaactcgcgcggcaccacagcgacgaagccgctcacagtgacggtgaccgacgcggcacccgcacgacccgtgctctcgcacgacaaccggatgattcgcaaggcgttaccctccgacgcacaggcgattgcccaggtgcatatcagcagctggcaagcggcgtaccgtgacctgatgccggccgagtacctggatgcgttgcaagcaaccctggcccagcgagaatcattgtgggttcgctcaattgagtcgagcgatgctggcgtttgggttgcagagcggaacaatcaggttgtcggttggatatccgttggcgccagccgcgacgacgatgcggctgggcaaaacatcggcgaggtcatggccatttacgtcttggcgggaaattggcaaacgggcgttgggttggccctgtggcaagccggcgtgcagcacttgatggaacaagggtatgaccggctgacgctttgggtcttggctcggaatgagcgagctatccagttttatcgcagggcagggtgtgttgaggaggcgggcagtgagcgcagacccgtttgccttgtggccggagttccttgagcagcgaccagatcccgccaaagtgaccttgatccgcaacaagacggacctgaccggcgaagccatcgccatggaaaccagcgaagatggccacgttaccatcagcctgagtgccaagtcggccggtgacggcctggagttgttacgcgaccatctcaaggcgtgcatgggctatgagcagacctcggaaagcagcttcagtgcacgccgcaggcacctggaggcactgcgtcatgccagcgcggccttggagcacggtcgggctcagctgacgttggcgggcgcaggggagctgctggctgaggatttacgtcaggcacaacagctgcttggcgaaataaccggcgcattcagctccgatgaccttctgggaaggatcttttccagcttctgcatcggtaaataacccttcgttgtccacagacgtgaatatacagattcatattatctaatcactatatgcagtagctagatagttttttttaaagctgacatcatgttttatgtagtgtttccctgcaatagaactgaaacaggctacagacagcatcactttatgggaggcccagaatagaaagacctctagggtgttgaggaagaggtgtttgcctcattcatcaattaccttgtatggttatagtgatatcacgaagattacataaaaccttacaccaggcaggcagaagaaagaaagacaatctgttctgatagggttaggggagactcacaaaatgtggagtagcaatatgtgcaaaaacgttcattaaaactggttaaaacagcaaaaagctgaaagtaacttaaatgtctagctaataaaagggaaatgattaaatcaattatgggccattgacctgatgggttattatgcagctatgtatctcgtcaaccgaatgggggttgacccgtggcacaattgggaggcgcactatgaagtgttgcctggtaaagagaaggtcgtctctgaactgaaacaactggctgaaaaagccgaccacatctatctcgcaaccgaccttgaccgcgaaggggaagccattgcatggcacctgcgggaagtgattgggggtgatgatgcgcgctatagccgagtggtgtttaacgaaattactaaaaacgcgatccgccaggcatttaacaaaccgggtgagctgaatattgatcgtgttaatgcccagcaggcgcgtcgctttatggaccgcgtggtggggtatatggtttcgccgctgctatggaaaaagatcgctcgtggcctgtctgccggtcgtgtgcagtcggtggcggttcgcctggtggtcgagcgtgagcgtggaattaacgcgttcgtgccggaagggacctaatggtaaaaatgaattcaaccaattcgatgatacgagcatgggtagcaccaactatgagatccttttgagctcacaataaggattcaaagaggatcttggatggatcttatggagcacaaaaggatgggcttccacatatgaatgatagcttgaatcgacagcctgttttggggatgtaggaagcactttggcaagcttgagcaacctttggtgatggctagcacacgttggcgagctaaagccatgtgggcgatcatcaaaccaattgggtaatgccataacctcaaagaaaaaaacaaaagacacaaaattttcttggctttcaagcacgatcccaaaacagtcctataacacaaattgcaaagacaaaaccaatagcatacacaaaaccctacaaaaaacacacaagtttctccacctcacaagatttaacccaatactctcatatttcttcagtatattcattttgcgcctctttttcaacttttccctcgcaagcgtaaacctgtctagacattcaaaaaacacatcaaatcttatttaaatacccttagctctagtattaatccttagttttgaacatcgaatgtgccaatatttcacaacacatcaacaacctcaactaagaaccattacttgtcctcaagtgatgataaagacaacacatttgactttcaaacacccagcacctcttaatacttatggagtagctatcttaaccagaacttatatccaaaaccatttatctgacatgcaaggatcaatgtatgacatcccattgctcatagtcaaccctgcttatgctcgtgtacgttgtcaaccaacacaattgaactatcaaatgcaaatatagtgtcctcacgtcaaagaagtccctcagacatgataattgggactaaatatgacgcgataatcgaagcaatcgtcgagctgttcttttgtcaaacggcttgtaatccgctcgtccgcttcaatcaaggaacggaacggcacttgtttttcccatgcttccatcgctttcggctgcactaaatcgtacgcttcttcccgcgtcattcccgtatcaattagggcgagcaggacgcgttgcgaataaatcaatcctaacgtacggtccatgtttttcttcatgttttccgggtagactttcaagttcttgacaatgttggcaaagcggttgagcatatagttcaaagcgatcgttgcatccggcaaaataatgcgttcagcagaagagtgggaaatatcgcgctcatgccacagcggaacattttcgtacgccgtcagcatatacccgcggatgacgcgcgccattcccgtcatgttttccgaaccaatcggattgcgtttgtgcggcatcgccccctgcatcatacaactttctaaactcaagtattgaaaaccttaggttctcaggcacaatgctcacatcccctgaaaacagccacgctgacgcagtatttaagtctgatgccttgttggcgggggcagcatctttggttgattttgcgccaacagaataaaatccttgagctattaccagcttcctgttatctctgtctaagtaaatgagatctaccttcttgtcgtcatttccatctgtcaatgcttccgaagccaaggcttccaggtcaggtgcttccaggtatagcccaatagcccatatcaaatacgcattagcttccttcagtttggctatgagattcgtggattctttaaacgattttagaaatgctggctgtaccatctgtaaagtttaagattctttgttgcgaagatgcttaattgtagcgaggctatcgatgttaggttactaacgtagcggtcctcgggccggagcgacatggccttcatcgtgatcgcgtccagcgccggcgggacggtgctgttgacatgccgcggccgggggaaatcgcccttcttgaccttcgccagcagggcgccgatggtcttatcctggaacgggacggtgcccgtaaggaggctgtagagcgtggcgccgaggctgtagatgtcgctggccggtcccatgcggtcgaggtcgccctgggcctgttcgggactcatgtagtgcggcgtgccgatggtcgatccgtagagggtctgcccgtcgcccgaggccgagaccggccggagaggcttcggcgcgtcgtcaccgtctggcatggggcggcccagcgccttggccaggccccaatcgacgaccagggtctcgccataggggccaagcatgacgttggccggcttgagatcgcgatggatcacgtcgcggcggaaaatccactgcgtccacttgaagaactccggatcggttgattccacagagcggcgcggatcgtggcccaggcccaacatgcccagctggcggcgcatgttttcaatattcgcctcggtggtggtgcgcgggtgggtaccggtctggatggcgtactgctcggccggcaggccgaaggcatcgtagcccaaggtgtgcagcacgttcttgcccagcatgcggttatagcgggcgtaagtatcggtggcgatatatcccagtgggtgtcccacgtgcaggcccgcaccggaagggtaggggaacatatcctgcacattgagcttttccttaggcaactcgcccgcatcggtggcgagctcgcctaccgggttcggggcgttgaaggtgccattgtctttccagtactgctgccaggtcttctcaatctggttcgccagctccggggtatagcgggcgcataacaataccacacgccagacctgtaaggaggcgtaatctggtaccagtgcgctggcttgttgcacggatgagtgaatagacgccagagacaaaccttgcagcacaatcaccccggcacaagcgatcagcgccagaacgctaatgatggcaaatggtgtggtattaaatgtaacgcgagctgcccgcagaattgcggcagcaagtattggaccgctcaacaataccgtcaggaagaaagccagcgtagtgtaaccgttatgccaggttggcacggtgtcgatttgatacacgcaggtcatcatccagacgaaaatgacgccgagcgccatgctgaaaagtaaccagagtttccccaacgcttgcggcattttaccgatgactgccaccagccaccataatccgccaacggcaaaaaatatggaaccggcagcaatctcgttactcagaccgatgaaagagcatgtggactaggcttgtccgttgagcacagccatatattacaattgagtgtgtgcaaaaaaaagaggttgataatagggaagaaacgaaaccagccggcgcgagttattaagtaatccaaccagctagacccctttggctctttacgagcgcacaactgcagcgggtttgttcgcttgaacagctgctgaggacatagagtcaacgtgccgcttagtggaaacagcaatgatctggtacgttaatgatattcctcagaaacgagcgcatacacatacatggtatgcaataatcagcaccatagctccacttccgagcgcattagaaacgaaggatagtgccgtgtcagtgatcatgttttatcgcttgcgaattgatatgaagacaagtgaagtaaagcgtaagttgaagaccaagttgatctttttatccttaacatgtacatcatcaccagcgcgacgatgatgtacatacatccgatctttttgtggtccaccgacgtgaaccactcgcgccacaaatagccccatttgcgtttccaggtaatggtgcccaccatcgccgcgccgatcagcccgatgaaggccagcgtgtacatcacaatcggttcagtggttggaatcgcatcccatgacagttttccgaacattgttattgctcctcggccagtaaactggggtgtttatcgacgcgcttttcagtaccgctcaatggcgctcgcctggttttattggccttgttcatgccttcgtatttatcgacgatgtccaggaacagccgctcctgcactgccgagtaataggtcacggggtgcttgatggtgggcttggccaagtgcgcatagctcgtttggtcaaggtctgtggaggcgcccttgaccttgttcgcccaggtctggaaaagtccaagtatcctcacctctttccttccgattccactccagcttgaggtaatagttcctcttcagtttttcagtcattcatgtgtaaattcagtcttggaatcatgttccttcagtttgtacttgtattttctgtgtatttgcatgttcttggaactcaatttagtcagaaatacatttctcagtgtttagtggtagggattgcaggcctcttcctctatttcagctagtttagtcttcattcgaggacgaatggtcccaagggggagataatgtaacaccccgtatttaaaacagactaaaaattcagattttgagaagttccaggtgcaacccacggttgccatccacggaccgtaggtcagacctcggtccgtgctggtggtccgtggttcaccactgaaacccctcccagtcccatctcaaaaaattggctaatttccgactcacggacgccccaaaaccacgtgcaatggttaataggatataaatgtggcggtccattgaaaaggcccgaaaacccgccccaattacgggctctgaaggcttttggcacgaaccgtcacccggacgcacagctgggcgatccgggttgccagtttttaagacaatagcggcgaccaggccggatcggacgccagccccggcgtcgggactttcagttcgttgcggccggaaatgtcgatggtgaacagcgacggccccgatccgagatcgcggaagaacatcaggacacggccgttgggcgcgaaggtcggcccctcattatgatagccggaggtgagaaggcgctcgcccgacccgtccggcttaatgatgccgatcgagaattgcccgccgccctgcttggtgaaggcgatgtagtcgccgcgcggcgactacatcgccttcaccaagcagggcggcgggcgccagagcggcatcggcgcgctgcttgcgaacagatgcggatttgtcctcgaggccaaaggcaatgttatcgatcacgctcagccacggcagcagcctcggctcctggaagacgatgcctattttttcgttcggcgcggtgatcgcctcaccgtcgagcacgatcgtgcccgtggaagcgcgatccagtcccgtgattgcgcgcaacaatgtcgacttgccgcaccccgacccaccgatgatcgcgatgatttcccccggcgcgatccgcgcggaaaaaccttcgagcgcgttgacgccgttcggatagacttttccgacatgatcaatagcaagcatgtcagttcctcgcggtatctgcgctgaaggaatcctgccagcgcaaaagcggtgcggaggccagctggatcagccagtcggtggttttgccgaggatcgcgaatacaatgatggttataggcgtagccatcttcgactttgtgcttggtttgcaaggagcggccaaaaccatcccaacagctgatcgccatgcgaatctgcttttcgggatcctcggggtaacgatccgcttgcaggcccaccgcatgggttggttcgcgcagtatcttcggcagcagcgcaagcaagcgttgccgcgcgggcgtcaactcatctgtcgctaacaaccagcgcacgctggcgcgtacatagccgctgggcaacaggtcgccttgtgtcacgcactggcttatccaggtcgtgtcctgccgttcgtgttccgacacgcggcccatccaactgaaggggttctcgaaataggccgtggcggcatcttgcagtgcgtcgtccggtgcttcgattgccgtggcggggctatcgtcctccgggcggtggtaattaccgatcggtttgaagcccacaggtacacgtcttctctttaggtatcccataatatccctaattccatacatgtatgcatctcatgaaatcattaacaagtttatttcacaacacagagaatcaaccatcacataaccctagttcacgggatagggcttcttcctatggtatacttttgatgtaacaattaggaatatacgcataatcatcttttttttggtgcacaaaagcctacgcatgaatactaccgtcaattaccaatacactatgccgtgagtcacagatttataacttctcaattaataaacctagcctacctgggcgccaagcagctacacgggatttataactccaattcaggcttccaaacgacgagacggtagattttgaccggaactccacaggctatcgacatccttacgctagaaatctctttctccttccttcccaagtttagagcaatcttttggggttttctcgggaatcaatagttggtgtagatgcgccagaaagtgaggctggttgcatcctcaaaggagaatctatataatccttttttccaggctccatgagaaataatttttaataaatgaaattaagattgcaatggataagtaaaccgctgcaaatgttttacgctaaccgacaaaaatactgtcacacatcttggttcatgcaagagagtgtagcgcagaaccaaagtctcactatttgtaattaaagatcgttttgctgtttaaaaagttcccaggcatgattaagaatgctaaatgcagattcagctattaattgatgttccactgtagtctgctggggtagtttatcaggatgcactcgggacaccgctttcatgtaggcaatcttcaccttctttggtaagaccaattcagaaagcgaaaccttttgccagcggcattcaggccacaaaatagtatctcggcatcgagcgccttgattttgacttcggccggacgttcaacgccatcgtaaatgccgggtacggacaggcagccttcgtcgtagactttcttttcttcgctggcccagacaacttcagggttaataaatacctgaagctgatcattggtttcagagacatcgatgaccagcaattgctcatggacatcgacctgggatgccgccagacccacacctggcgcgtcgtacatggtttcagccatgtcggcaatcagttgtttgagcttgtcgtcaaaaacggtgaccggtttcgctactttatgcagacgcgcatcgggatagcgcaaaatatttaatatagacataagacttttcacaacaagccgggaaggctcttgcgcggtttttcttgctagttcaaggatttatgggcagaatttgattcaatttggcaagttttgcaagctagtgcgtccatgtcggtgagactctgcttcagttcgcgatacaccacgccgaggaaattcagcggaatgtagagctgcaacatgaacgtattgatcagcaccagatcgccgagcgtcagcttgcccgccatcacaccctgggtcgcgcgccacaggatgaaaaccagccccgtgccgataatcgcctgctggccgaagttgagcaccgacagcgagttctgcgacttgatcgcggcagcccggtagcgcttcaggttctcgtcgtagcgctgcgcttcccactcttcgttgccgaaatacttgacgatctcgtagttgagcagcgagtcgattgcccgcgagttggcgcgcgaatcgagatcgttcatcgtgcggcggaagtgcgtgcgccactcggtcatcttcacggtgaaggtgatatagaccgccaacgccacgaacgtgacgaccgcgtaatactggccgcccagagcagggatgaagaacgagttcatcacggcgtcggaggtgatccggaagttaagcggggtgttctccgggaactggatctcgttgacagtggcgatacccaggtccgggtagatgaacagccacttccagtccagcgcgaccacttcgatgttgatcggcttgacgtcggattccagcggacggtaagggtccagctcgtgggtcgacttataggtgatgtaacccaaggcgatgatgatgagaaccgggaccagccacaccgcgatttcgatcttggtggagtgcgaccacttcggcgcgtaggtcgcgctggtgttcgacgcacggtatttccaggcgaaggcgaaggtcatgatgatcacaggcaccacaaccaacagcatcagcagggtggcggtgatgatcaggtttcgttgatccagaccgatctgtcctttcgggtatcaggaagaacgagaagaggctatcgcaggcaagccagctcccacagaagagccagcaaacctggagaaaggaatttaagcgtaggtgtcgatcaacgtacccagcatttcatccgaagccttggcgactttcgcgcccagttcgacttgaaacttgccttcggccatttcgaccatattgctcgccgagttggacggttgggcacggtcattggcgcgaagacggtcaacctgtgcatccgagggctgggtcgtcgcggcgctggcgattttgccggcggcctggtcgacacggttctgcccggtctgaatggtgctcaggcccgaataaaacgcgctgcttccagagatgtccatggcgtaaacctgcctttagagaatcgtgaacagtgattgaagcagagaatccggcaaaacacccgtcaaaaacactaatggcataatgccttagcgcttttcgacagaggcctctatcgttgccatcagtccctttagttcactaagcttcaaattcaatttgttttgctcttcaatttcttttagagaggaatccaacattaaatcattgtcattcggcactttgaaattattcaaaccactagcacttctatccacatgatccaatgtagccagaggaggtgaaggcacaggttcctcaattatcctaagcttcactgcaggcacagtatctgcaggggaatgttgttcttgcttgtgctgctgttttgttttgatttcagagtgattaaccccaggagtccgcttacgcttacgtgtagatcgctgttgcaagcttaaaaaggcaaaagaaagcaatagaaataagaacccatactccaatccaatggtgtaaaaagtcatgaaagtaaaagtataaaagaaacacctctcctcgaaagcatcgataacccagggcgcgcaggcggatctcatagaattccgattggcgcgcgttgttcccctacgacaccgcgcgccaatcggaattctatgagatccgcctgcgcgccctgggtgaagaagtttccgaaggccatggccctggcatccaggaaaacctggtagtcgcccaaggcgtgctggaagtgagcgtcaatgatgagcgctacctgctttccaccggtgattcgattctgttctacgccgaccaaccccaccgctaccgcaacccggcggacagcgaggcggtggcgttcctagtgatcacctaccccgaacggctggactgaaatgcaaaacgccccgacaggtcggggcgttttttatagtgcgcgacctatcagcaggtgcagcacatcatcggcatgccgttgcagctcatcatcatcggcatggcgcagtcgttcatcattttgttcatggtaaacaccatggcgcctccgtactggcccacctggatccgcgacccggagcgcccggactacgccaaacccgacctgcccagcgtgctggtgccgcagtctcacgaacacatcggcgacaagctgtcgaagaagaacgtcgattgggcctggtacggcggtgcctggcaggcgacgatcgacgagcacaaggattcggcggcgattcccaagatccccagctttcagtatcaccaccagccgttcaactacttcaagcagcaaggtccggaaaatccgctggagcgcaagaaacgcctgcgcgacggtgggctgggcgatgagccgagcaccaatcacttcctcgcggatgcccaggcggggacactgccggcggtgagcttctacaaaccgcagggcaacctcaacatgcacgccggttacgccgacgtggcctccggcgaccgccatatcaaatcaatataatagagtatatgggtctcagagcttcggctcagtggtgaaagaatcacaagtatgtgatgtgtgagttaaggcacatcatggactcaaacttaaagtctagtatttaagttgggaaaagggtagaggagcaggcagtactcccaggagttctgaacttgtgcaccaactggagttggatagaagcccaccgggaatttctccgatataaaaaagacgcacacataataaagatgtggaatttcacaataatgaaacacatacaatcctcattacaaagcacttgtttatcgcgaatgcaacccacaccaatatatccatcatttgtcattggcacataaaaagcacaacccaaaagtccaagaactctttttctccatactcaacccagatagacagtcaagcagtcatcgcggtagaaataattaactaccttaacatatagggggccgagcggcccgcgacgatcgaaggatgccgcgacctccccagcccctgccttccgccctgggcgaggcgttctcgtgctcggcggcatccgctctgggggtctcggctaagcggatgcgtgcgtccgacctcgagaccccgttccgcggcgtccgccgccgacgcaccgaggatgtcgccgacagcgggccgctcgcggaggaccgggctgtccggcgccgtgtgctcgccgacgcggcgtcgtacgcgcacgtcatgtcggacgacgcgttcttctgcggtcgcacggccgcgatcttgtggggcgcggggatcgcaccccgcactgagctcgatgtcggggtcatcgcgccccggcgcgcgccccgccgccgcggcatccgcgggcatcagttcgctccgacgcacgtcgtactcacctcactcgagggcctccggatttcggatcggctcactattgcggtaaaccggacgaagggcttgtacgcatgtgctcggttgaacggttcagcgtctatgctggtccactgacttccactgtccgatcacacaggtgaacgaaaatggccaagacatacagctacgccgctcgggactccaaggattcgctcaagccctttaccttcgagcgtcgcgcgccgggggcggatgacgtacagatcgacatcctgttctgcggggtctgccactccgacctgcacaccgtgcgcaacgagtggcagaacaccctgtatccctcggtgccgggccacgagatcgtcggccgcgtcacggcggtgggcgccaatgtgaagaagttcaaggtgggcgacctggcgggcgtcggttgtatggtcgacagctgccaacactgtgcgtcgtgcgccgagggcgaggagcagtactgcgagaacggctttaccatctatattgaattgcggattccgaaatgataaaatcatttttgattggacaaaaaaagggtctcctatagaagatagttaagaaaatcaaagaggagaaaacgcgttttcgagataggaatcggtatctaatgaattcaatgcttccagtataaatgaaagaaaaataaaaaggaatgaaatcacaacgagatcctaatctcaaaacaaaaagaaagggggatatggcgaaattggtagacgctacggacttaattggattgagccttggtatggaaacttactaagtgatcactttcaaattcagagaaaccctggaattaacaaaaatgggcaatcctgagccaaatcctgttttctgaaaacaaacaaaggttcagaaaaaaaggataggtgcagagactcaatggaagctattctaacaaatggagttaaatgcgttggtagaggacggtagttgttgacccagtaattccagatcaggtcgttcggacgcatccaggcgaacatgcgggcaagatcgtcgccatcgagaacgcctcgcaggttcgaggatgccttggccgccgccatggtctcaggcgtgatcagcgatccgaacgagctttcgccgaacgtgccgaagtcaagaatgcacaccgccaggatcatgttcctgaacttgtgctgtgccgcgccgagggtcgcgaaataggacgatgacgtgattccgccggagcacgaccccatcatggaaatatcgtcgcagccggtgatgtcgcgcaccgcgtcgacggcctcgtcgatcgccgccacgtagctatccagcccccagtcgcgatggctcacgtcgggattgcgccagctgatgcagaatgtctggatgccgctgtcgagcagaaagcgaaccatgctcttgtccgggggaagatgatggtgaagccccactcgatgtaggccagcacatcggcgtagttgtcgtgaacctcctggatgctgtcgaggatcacgatcacaaggctggcgaggatgatcagcagcagggtggagtcgaagcgtcggccggccacggtgtcgctctggaacaccattacatacagccgttgacgccagttgttgctgtccatggaaatcgcctgaatcgaagatcgagcaagcctagggggattcgaaggggctgtccatgcggggtttgcgcagcatccggcgggtagcatgcaccagccagcaagcgaggataaacggcgcggtcagcgcgggcagctgcagggcagcgaagcccggcgtaaggatgatcgccaggccgatgccgagcaatggcatccagggttggcgacgtgtctggctcagggccagcgcggccaaggccgggttatagatgctataaagaacgctaaaaataaaggcattatcttagtagccgcagcagggaataacatggatgattatagtgactatccagcacgttttaacgaagtatattctatcacagcaatagacaaaaacaataagccatttatatatgcacctactaaaaaaatcgattttaaagctcctggcgtagacgtatatacaaaaggatcaaaagatgagttacttactgtaaatggaacatcttttgcagccgcctatttcactgcttatctgacaaataatcttgaattccgaaatgacttaccacatattttaaaagaatatccaataaaataacgcatcaaaggagaaaacatgaaaaacaagataattatcctatttctagcaattattataacttttacttacggaaactttgcagaagcttctgtggttataaaagaagctaatattaacctctgaagccatgatgaacaagaagggcaccacccagtcacagctggtctacgcctcagcaatctctgaatggggcgaggtgggcggctatgacgtcgaggtgttgtgggacgtctgcacggtcgccgctctcggggtgcccttcgagcggtgtcgccaccggtcgttgtcgacgttgtcgagtggtgagcaaaagcgggctcgcgctggaggcgctgctgcgtggcccagatgatctgctgctgttggatgagccggacaactccctggacgtgccaggcaagcgctggttggaagagcagttgcgcgcgacggacaagggcgtgctatacgtgagtcacgaccgtgagctgctggcccagacggcgacctcgatcattacactggaactcggcgttgcgggcaacactgcgtggacgcatccgggcgggttcgacacgtaccaccgtgcgcttaaagaatcagcccgtcaaattttagatattcctgattcaagtttgaagtctccagctaatttggattttaaaattgaagaagcagataaaatgataagttcaaatcttgatacagaagccgacttgagtgattttccgatactatcacaaaagagttctaacagagacctcaattcttttaaagttgagagtccaaatagagaaatccccaaggaggatgaaaacaagagattctctccaattattggcacggcagggaccgacacttctacaaaggcactcgcggatcaaatgcgtattgcatcggtgatgttgcaacaactagacagttcaggaaaatcaacatccgaacaatctatcgccattagaaaccgtatagttgaatcaatgattgctttacaggatcaatttgattcgattgactacgaaaagctcaaccaactcaaagggtctcaaggacctgacgctcaatgccggccaactgaccaacgacaacggtttagtggccagccaggagcaggcccgcgtaacagccgggcagttgagtaaccgagcgggcgaaatctccgccagccaaactaccgttaccgccacgacgctggataaccgttccggcaaagtgctgggcagcaacctcaacgtgaccgccagcggcgcgattgataaccggctgggaattttctccgccaccagcctgctgacgctacatgccgcaagcctggataacagcgataaaggctccgtcgccagccagggcaacttgaccgcgaccatcgccgggctgctcgacaatcacaatgaaggcaacctgatcagccagggcgcccagcaggtttccgttgggcaactgaacaacgcccaggccgggctggtgtcgagtaaaacgaccctggcgctacacgacgatgccgatgagccggacatgagccccttgaccacggtgggaagccacagggtgtaaccatagaaaccgcccatgaaacacaggtagatggtaatgagttgccacacgtgtgcgctgcgggcggcggctagatacccaccatcgccatcgatgatgggtttgttggcttcgtcggcggtcagttcggcctcgatgtactctcgttcggcgtcggatgcccatttcgcattatgagggtggtcggagacgactaagagccatacgatcgcccatatcagtggcgggattccttccacgaagagcaccgtccgccaactgaaatggtcgaggagtgctcctgtgatcggggaaatgagcaccgatgacaggggtaggcagcacatccacagggaattggccctggcacgatctttgagcgggaaccagttggcgatgaggatgagcaccgagtttagaccttagctatagagtcagttggccctcacggctaaaaggtcccattttgaaggtcaaacgagcaccagagcaggtaaatccccatattgtcaatttttgtgtgctatagtccatggactttttggtgaattggaattccgacataacttttgccaaaaattttcgtggacgaccgttaagaacttagctatggagccgttttttcctaacggccaaaacgtcccattttgaaggtcaaatgtgccccggatcaggtaaaccccccattttgccgattatcgtgtgctatagtccatggactttttggtgatctagaattccgacctcatttttgcaaaaagttttcgtggacgtccgttaagaccttagctatggagccagttagccctcacggccaaaacatcccattttgaaggtcaaatgtgccccgaatgaagtaaaccccgccgcacatcgtcgtgcagcaccgacatggcgacggcagcgcccagcagcagttcgatcgcgcacgggtcgtcgccgatccgcatcggcgcttcaaacgcgacatcgatcatccgcagcacatgcggcaccgcgtcgggatgctcggcgaagctcacctcgatccggtcgcgggcagcgacggcaatcctcgcatcgggcaacagcttccggatgcgtgcgccgacggcttcgctcagccggttggctcgggaaaggccgacatgacgccgcaggaccgggaaattggcgatgcgcgccacaacgacaacctcgcgcatccccggcaatcgcgactggcgcgacgaggaagcggcgccctcggggcgcggttcaggctgctcgcctgcgctaggctccggtcgttccatgcccgcacggggtaggtcgggaggttaaagaaaccattaacggcgtaaatcacatgattcaacctatggaatggagttgatccatttcagaaaaaaagaaaccgtaacccatgatgaactgctgaaaggcgttttgaaactggaaacagaactggaaaaaatcgaaggagtggtttttcactgccttgtccggaattattcaggagtatatgcccatatattatttgtaaagcaagaaaaagatcttgaagcggtacatcaacttttaaacaaatctgaggaagaattttctttattccatttgactgacgagctgagtgtgcaaagacaattccataagatccataaaacagattttaaagttcccgattttttctcttgtatagaatgcggtactttttccttaaagccacataaagagtggaaccagttagtagagatttctgaccaactggaaaaggagtacctctatcgttttcaaaatacacaggccgcgcactattcacgactcgtcattaagtaaagcaatccacggcattgttgccgcacgctgtggcctgctgacccaaagttatcagttctggcgcgaggggactgaaatcgatcttggtgctgatccgcatagttgtgatgatggtatccatgctgccgcaactggcgctatctggctgggggcgattcagggttttgccggggtgagcgtgcgtgacggtgaattgcatctcaatccggcgttacctgagcagtggcaacagttgtctttccctctgttctggcagggctgcgaattacaggtcactcttgacgcgcagcgtattgcgattcgaacttctgcgcccgtttcactgcgtttgaacggtcagcttataaccgtggctgaagaatctgttttctgtttgggtgattttattttgcccttcaatgggaccgctaccaaacatcagcttctgactcaaagttcgttcatgtatgcacttaaatttgattagcatttgttatttattattatttactggatgctctaggactcagtcctggaaataaaaatagcacatactagctggtggttttgattgctctccaagaaccagacattctgttaagtgtcttgcacacgttatctcattctggattgagttatgagacatgattttacccatttttattaatgaagcagccatggtgagaatttaaaactgtggacaaagtagtgtttaaaactggctaagcctggatgttaatttgcttcggcccagttttgaaatgcatgcttctgccactgtgacatagcccctgcctgaagaagcccttcagtgggagagagagctgcatagatacagaattagagaattgtgtgctaggggctatcagaatgatgaccaataggctttggagatcgtagagatttcggaagagggccactctcttgacgaggttgcggatgcttatctgacgctggcccgccgcgtcgacatgattcgcctcaccaggctcgtcgagcagcttccgcaggatcgtccgacggatgccagagtgcgggcgagtttgcgagaagatctgttgcgagtgatgtcggacgcgacccgacgcgcccttgtgattggaacagacaatgttctggcagacggtggtcgtattgtgaagtcgatagcggcaaatccggatctagcgcactgcgtcgtgatggtcagtgatctacggtccgccgtgggccaggaggtcacattgtgagaattgatcttcacacccactccacgatctcagacgggacagactcaccgacccgcctcatgatgaaagctgccgggagtggtttagacgttgtcgccctgaccgatcacgacacctcgatggattttccgatgcagttcatcccggcatgggatcgcgagaccaccagtcgaacgtcgcctttgctgacgcagatgcggccatgaccgggggcgcgttcgagcgtcaggcgcggggcggcgagcgcctcgcaaacaaggtcccatcttgcatgatggccgatttcggaaggctcgccggcgaaggcttcctgcgcgacatattccgtcacggaaggaaccgccgccgcggcaatcgccagagcggagaaggacaatatcatgacgctgacgacaatgcgcttcatgccgacacccggtcaggatcgaatcgctgcgcgtcccgtcagcttccgcccgcccggcggcggctgtcaactcacgacctgtcaggtttcacgagcggtaatcgccgttgatggcgacgtactctttcgtaagatcgcaggtcagcacgcggtcgcggccaccggcgtgttgacggtgtcgcgggtgaccatgagcagtttgttgtcagcctctgtcaccagctcatctacggtcacattgcgctgcgtgtcagtcgcttgggtcagttcccaggctaacgctgcggcgagcttgttgttgtcgtccgccagccaatacacccgccgcaacaggccgcgtgcggaagcgctgtatacgccctgtggataagccttcacgtaggcgtcaaagccttgctcggcctttgccagcgcggccttgtccacgcggtcgaggtggggcaccccgtactcgtcatacgtattggcctgggcctggttcagcgccgtgcgtgcggtcatgtacagcgcggtttctttcagccacggtgagctggcgctggcgagggccataaaaccagactcagcctcggcaaagcgcccgctatagaagtcggcggcggcctgcaggtccgaggcgaccacggcgaagccgcggccggcctcgccggcgcgagcggcctcgatcgtggcgttgagcggcagcagattggtctgcgcggcgatcgagctgatgagccggaccacctcgtcgatgcggttggccgctcccgccagggcatcgaccttggcgcgcgcgtcccgtgcctgcgtgacggcgctcgcggcgatctgcgtggagaggtcgatctggcggtcgatctcctgcaccgaggcgagcagttcctcggccgccgaggcgaccgcgccgacattggcggaggtctgctcggaggccgccgccacggaggcgctgcgcaggctcgtcgcctccgctccccccttcagcgtggtcgaggccgtatcgagatcgcccacaagcctcagcacggtctcggtcaggttcgagatcgtgctgtcgaagctctgcgagtggcttcagatccttcgggtggcgcggcttttcgtttcgcagatggcttgtgtgcatcgccgcgaaaccgctcacccgcgtgacggcgaatttcgcccggtggaaattcgccgatccaaattaagccggaatttgttcagcaagccttcatgggtcattcgcaatactgcaaacgatcaaacggagagagaggcattgatgaataccaaatccatcatcgtcggcctgaccgccttggctggtcttgccgcaatatcggcaccggcgtcggcgatgccgatcggtgtcatcgcttcaggccagacgagcgcggtcgaaaacgtgcggctggtgtgcaacgcctatgggcgatgctggcgtcagccgacctattattacggtggaccgggttactacggccgcccgcgttattatgcccggccgcgctattacgggtacggctatcgccgctggtaatcattgacgccggatatgcccacaatttattcctgagaagaccgataaccagaaagaccttaatgattccatgacttaaaagatagaacgcgtaaaaatgctggctacttacagaaaaatgagtagcgaaagtaagtaggtgggttgcaataaaatctttcgggtcttcgacgagttcttcttgcgtgagcgtgttaaccaacgccagtattgtgctcttgtcaccgaaggccaacgcgagaccgccaatacattcgatcaatgcgtgagcacccttaagaattaggctgacggaaaaaatccggtggattcgattttcgttcataaattttatccttttatcaacgagatccggctgcaatcgcgggggcgccggctccggaagcaatggagcagaaaaatccatttaaaccatcctgctatagagccacaataaaaattgccgggtcctattcctgtttactaataattcattacgagccccactccaaaacccatatcgctatcgtaatgtgtacggatgcccatatttttgttaatgatgtactttaggtctgccatatattccatatcagtattgaccaaaaatcctgctcttaatcttttagaaataggaatgtcttcacgcattaatgacaacctaacaatgccatcgtgatatacctctgcctgaaaattgactaacattggcaatgtgtacataaaacctaaactgaacgccctgcgggtgtctttcttgttggtttgtccaaatatgttcttttcgtgttcatcttctcccattttacggtagcggtaatcaaaacctacaaagggcatgaaccattgcatctttccaatgtatctacctaaatgggtttctacttcataaccgtgcatactattatagcctaaacgccattctgatgtgttctccctccacataatttatgagtaacttgatggccaggtggcttcagcagaagctgatatgcaatctaaatctggagtcatggaaaccaccgcatatcaacagatcgcatattcaaagccttctgctgtctgtcagattcaagcaaaggaagctgatgttcaagctcttgcagagttgactcgtgcactagacaaaaaggttacaatactaatcctaatttttacttcatatgatccatgcatgaagattatacaaatgaaagctagctctttctttctctccctacatatgctcgtatctttgtctgcttatgctagtcgtgtagacctaaataacatgttcactctccaacttaaacttatagatgaggtggtcattcaattcaacatggtgtcatggtgatacaaatcctatggtcgagtcttacttctcgtgcttgaatcagcagttggacatgggttagtcgatcctaagagatggggaagctccgtttcaaagacttgatttttcaagtcaccatcgaaagggaatccggttaatattccggaaccagaaggtggaatcaacacggcaacgtaaatgaagttggagacgtcggcgggagccctgggaagagttctcttttctttttaacagcttatcaccctggaattggtttatccggagatagggtcttatggctggaagagcgcaatacttttgttgcgtccggtgcgcttacgacggtccttgaaaatccacaggaaggaatagttttcatgcctagtcgtactcataaccgcagcaggtctccaaggttaacagcctctagttgatagaataatgtagataagggaagtcggcaaaatagatccgtaacttcgggataaggattggctctaaggatcgggtggtcgcgcagggcgagcttggcgaggatgcggctgatgtgcgtcttcacggtggcctcggagaggtattcgcgctgggcgatctcggcgttcgagagcccgcgcgcggcgaggccgaagatctcgcgttcgcgctcggtgagctcggcgaatgccggcggcaccggcttcttctcgggggccgagaacgtcgcgaacagctcgcgcgtggcggatgccgcgatcaccgatgacccggaatgcaccgtgcgcaccgcggcgagcaggaactccgggtcggcgtccttgagcaggaagccgctcgccccctgccggatcgcccgggcggcggcctcgtcgaggtcgaacgtcgtgagcatgacgatgcgcggcggctcaccgccgaacaccgggtcgtcgagcagctgcgccgtcgcggtgaggccgtccatgaccggcatccggatgtccagtcggaggtggcgccgtagccggcgacctcgccgtagatccgcgcgccgcgggccttggcgtgctcgtattcctccagcaccagcacaccggcgccgccggcgatgacgaagccgtcgcggttcacgtcataggcgcgcgaggcacgggaaggggtctcgttgtagcgcgaggacatcgcgcccatggcgtcgaacaggacggagagcgtccaatccagctcttcgcaaccgcccgcgaagatgatgtcctgccggccgccgccgatgatctccgcggcgttgccgatgcagtgattcgaggtcgcgcaagccgaggaaatcgaatagttcacgccgcggattttgaaccaggtcgccagcgtcgccgacgcggtcgaggacatcgctttgggcaccgcgaacgggccgacgcgcttcggccccttctcgcgggcgatggcggcggattagcgtgcccggcgagtcttgcgacgtactccaattgaaatcatttccgagggagcgaaccggcgccatccccctcgatggcgattgcgacgtgcgtccctgcggcatctgcgtggcgcaataggtgccgtcgataatagggttacagggctcggtacttgccgcgcggggaagtatgaccgtcatcagcgcggcgaacagtgcgcgttcgatcgagctgcgccggcaaatcgtttttcgcgcgatcatttcttgatctggaccattacttcctcggccttgtccttgggattatccagacagcgctcgagaaatgcatcggtctgcttttgcaatgtatcgatgttgaatttcgacgagccggatttgccgagaagatagccgtgcaggaaggcaatcgccacgtcgcggctcgatcccggctcgcgaacgatgtccttgcaggtatatccacggcatcgacacggtgattcccatccgtagcgacatgaatctgcaagaggatgttcgcggcttgatgaatctgcccacgacctgggaggaatacgagccgaagcatcgtccgccgctgccggatccaacccgagcgtcgcatggccaaccatcccaccccgcggcgaagcaccgtgaacaggcgcggcagcaaacgctggcccgccggcgagccgaacgtgtcgaggagtcaccgccggacccgagccgcattcgggaacgaaccttgatcgcccgattccctggcctgacgagttggtgggactgtccggtgccgctgaccggcgtgtactcgcgcgacatctacgccgacggtcatgaggacggctggttgttggtcacgaccaacgaggactggtcggcggctcgcgttcgcgaccgatacggcctccgcaccgacatcgaagcgttttgactataataagctgcatttctgagcttaattccagttaaattgcgttcttttaatatgggttgcagatgctcttgtccggttagtgtcccttcttgaattaaagcgtttcgtaaaatctgagttatatcctggcgatttctgtgcgttggggcaaagcatagtgtgttttggcgttcttctggtgttaatgacaaccatttacttgagatataatcaacccgttttaaataagtatcaagcgtttccacatgagttaacttatcaacggcatcatagatttcacctctaccagcatgaattgctgattcccttaattctgagtctttctggcgaagattatccgtcatggcaacggttttaatcccataatcttgaatgacagagaataatttcccgctggatggggaaggaagctgggctttatcgccaatgatctttaacgtttctatcatctccagaataaacttgactgtaatggttgtaaaagctagacgttctgttcaaccctccattgctattctcttcaataggtggtgaaaagctacgtgagatctttccgttcgttccgcttggaaacctcgacttcggtaaggcattggcaaacccaccaaaatcaatagaagcctggtattctgtcaatttaattggctggtacaatttgtccttgttcagctttgcaatttcgagagattggtgaatagaaacgtattttttgatctccgatctgaacgcttccttcctctttgcgtcaagttcaacataagtattaatttcgttagtgatttccgtttgccacgatggcataatatcaaatatcttttgtagagtttcataaaccttttggttgagtgaaccatcccttaaaaatactgatgatgaaggtacatcggttcgtcttcgccgcccaccacgttggtgggataacagcggcccagcgcgatatgactggccgcgttctcgtcgaacagggtgttcagaaacagcgtgccggtctgcgcgacaggggcggaggcggggaccagggccacctcgcccagccgggccgcgccgtcgtcggtggcgatcagggcttttagagtggcctcgcccttctccgcgccaacctctaccgccgcgccgttctcgaagcgcacgcggatgcccgtaatcagttgcccccgggcgctcagggctttggaggccaccgccacgccgtttacccggcccttgtgcggcgcggtgaacacctcgtcggtgggcagattgggcacgccgtaaatgccattcctggccgcctctcccccgccctgccagatgtggttgtcggccaggcccacggtcagatcggtccccagttcatcccgtagataccaaggtgcgtcgtaatgttcaaccagaacctcagcagcccaaaatattaggctgggatgcttccggggtagttactgagattggatcggaagtgactatgtttaaaccaggtgatgaagtgtggtatgccggtgatttaaccagaccagggtctaattgtgaatttcatcttgttgacgaacgcatcgcagccaaaaaaccaaagtcgttaagttttcaagaggctgctgcattacctttaaccagtttaacagcttgggagcttttatttgatagattgcaattatcagcagaagataaaggtattctattaattactggagcggctgggggggttggttctattttggtacaactggcaaggcaacttacccagttaactatcatcggaacaggagcccgccctgaatcaattcagtggatcctggataatggatagatcagagtatatgcaaaccttactcctaccttgtcgacatagaaagggcacaaaagttacccagttgggacctaaaaagcgatttaaggagtaaacattggttgcttctatatttggaagcaattgatctaaaaatcatttacaaagtcaaaatatgacaaacctttcatttttcaatccatccagcaagagacagcaaattaaatctcactcttgacagatttcacagcgactttcttgtgaaatctcataaacagtccaagttcaacctaagtttaagatatacaagtcaaatctgggatttgatttatcaggtggaatggataatcaacttgtttactactaagcggatgccagcattctgttggacgtcatatgaatccactgagaagtaagcatccacgaacgttcctgctgttatcaaggattccagttcttccacatcttctgatcctgatgcatccgcaggagcaggatcgtctgctcggcaccgcgcggctgaccgcgcttcacttcgccaacgccacgctgaagatcggcctgtcatggccgagcctttcgaaggtgcttggccgcgatgtcgatccgtcacgctggggaatattgtatctcggctcgtccaaggtcgccgatctcgagaccgacgccgatattgttgctatcgaccgcaagggcgggatcgaggagggccagcgcgccatcttcaaggacctcgaaggcgtgatcctgctcgacggcacatggagccaggccaaggcgctgtggtggcgcaacgcctggatgctgaagtgccgccggatcattctcggaccggcgaagccgtcgctctacggcaatttacggcgtgagccgcgcggcgacggactgtccaccatcgaggccgcagcaatgcctcatggagttgtctcctgaagaagtcggattacggcgctttggcaacggcggcgggtggagtccagatcacgtccttgatgctcaagggtttggggatcaatttgagttggtagaaggtgtcggcgattttttgctgggcggcgatcacttccggggtcaggaacagcgcgccgtagccttggcgtttcaccgaggtcagggtgatgtcagctggcaggccgagcagcggagcgacttgttcggtgacttcctgggggttggccttggaccactcgcccacggcgcgcacttcttccaccagcgccttgatcacttccgggtgtttttcggcgtagggcttggtggccaggtagaactgatggttgtcggcgatgcctgtgccgtcacgcagggtgcgggcttgcagttgtttctcggcggcggcctggtacgggtcccagatcaccccgtaagctcccaaagtgatcaccattcgctttcatgcatagctatgcagagagctgaaaacgatcctgacgcatccttcctgtttttccggggtaaaacatctctttttgcggtgtctgcgtcagaatcgcgttcagcgcgtttcagtggtgcgtacaattaagggattatggtaaatccacttactgtctgccctcgtagccatcgagataaaccgcagaaatcgtgtcagccagcagcctggattttttcggggtaaggtctttgctgcggtaatcagtacccgcaaattgagttgtgccccggagtgagtttaaaaattcctggctgtgaaactgttgaatgcgttgttgcacatcactccgtgattttcctgtcgctttatctttagctcccatatcccagaactgccgaaaaaaaggcaccatcattcgtgttgtgtcggctgctaaagacattgcgcagtcagacggttatcaaagaaaggtttcttctcacaatcagttcggtcacattccatcaagaattccgttgagagcgagttttaatcaaaaagggaaacgtgatcgctttaaagctaaaggattgaatgtagtaacgtatggtaaggaaactattcatatttctggcttagaacaacttgtcgatgacagtcaaacacaaggtttagcgatgatgttaagttatgtaaaaaatgaattgctagatgacaaaagtacgattgtagaattgaccaattgtttgtatcaacggattgagaaacacggattagatgttatatcaaatcatcatggtcatcctggtcatttagcgctacctagaaagcaggagtttattgcgacacttaatcgatatcgtagattaaaaataaagcaaagggaataaatatatgcccccctggtcgttgcgcgggagccgtacctaggcgcgacggacggggacgcgccggagaccacgatggaggtggccctggtgaataccggtacgtcgacggtgcggctcagcggcgcggtggtggcgggctcccagctgaggtgggaggccgatcggccgctcgaggcgggtgcgcaggtcactgtggtgctgcgcgagcagcgtccgtgcgaccgtgcgccggacgtgctgtcgagcggcggcgctgccggcaggtcgctgcaggtccgactggcccgttctgcaggcggcagtgacgggaggacgttgtcgctggcgctgccgccgacggtaggccgctggtatgacgaccatgtccgcgacgtgtgcaggctccctcggctgcccgacgccctgcacgtggtgcagggcccgtcgacggtcgaaggcgacgagcttgtggtcgctgcgagcacaccacgacaaccgaggtcgtctcctcggagctcaggtatggcgacgtcgtcgtcgtggcggcgggccagacgatccctggtgacggcgacatcgtctggggtatcgcttcggtcgacgaatcggccatcaccggtgagtcagcccccgtggtacgggagtccggcggcgaccgttctgccgtcaccggtggtacgacagtgctttcggaccgtatcgtcgtcaaaatcacctcgaagcccgggcaaagtttcgtcgaccgcatgatcgccctggttgaggggtccggacgtcagaagacccccaacgagattgccctcaatattttgctggcgagcctctcgattgtctttgtcctcgtcaccctgaccctcaacccgattgcgtccctggccgccaggccggtgagcgtcacggtattggtggcgctgctggtctgcctgttatataagagtataacaacaataactcctcaatcctaaactaattgaattgcccttgcaaattttcataacccgagttttggctcaatcatacatgtccttaatagccctaatgtaagccacaagtagacctctagactccaagcatctcatagaaattaaagcccaactgcttaaaagtcacaatatgatgtaaagcattgaataggcagccatcatctttacaagctcatgagattcttgaaattgaaccccattaactaaactttacaccacaattgctgaaaagtgataaagtttccatcttttacacccctttcactttttttcccttgttatttcagtgaacaacaacaataacacctcaatcctgaacgaatccaatttcccttatgaatttcccaatatacccactccattcacactcgctaagattactctaataccttatagccttcattctttagttcgctttcattagaagccaaaatctcttccatggtcacttcagacatgcgtctatgacacgaatcatgaaataataaaccaattcctagaattcctgcagtctgagttaatggtgaaatatttaattcattagatccaactggcagtaatgctgaaatgtgcacacttagcaattttgtaacctttgcatccatactccccaaatacgaggatgcaagtccaagtaaaaggcctatactggttgtatcatgcttgctagtaaggtaaataaaagaatgccaggtagcaagggcctttaaatgaccgtttagccctagaccaaaaagaaatcccgcatggtaagcagtcaaagtttcaggtcgattgaacataatccaactagtgtttatttcctttgaaaacttagatatcgataatcctagtgcgcctatgattacgctcattcgttttattatttggatggccattggtatggtgatttattttgtctttagctatagaaatagtgctttggcaaaaaaatagtctagcttgagcgcgctcgttaggtttttactgtttgtttgcttagatatgacttaatactaatgcagctgaaattattgctgctgcaggaattgtaataagccaggaaaagaaaatttttttgatcacccgccaatgcggccctgcgattccattaattaagccaactccagcaattgctcccgtaacagtatgggtggttgagataggaataccacattgagttgctataaaaagcgaaacggcggcgccagtttctgcagctgagcccttcattgggtcgagttttgttatttttgttcccatagtatggacgatacgccatcctcctgccaaggttccaagacatcatggattcatgtcctccaagcgtcggtacgggatcttcctggtgtttagtttgcaggtaattggttcgagtttgtacgtggtggtggtttccgtccactcggaaggcgccttcaaatataggctcaggtccatccttatgtactgtgattctggcccagcccacgttcgtccattctgcaccttcgtggtgctgcagccaggtagcacccttaaaaatcctgtgatccgacctgtctatcgcctctgtgcttcgaacgcttccatcaggtgccaggtactgcactgttgcaccttctgctataacgtcgtgattcggagacaggctcagctttatcctctgtttcttattatgtagatggaacgtcagatcgaaggaggagagggcgtgggcgcgatttgaaggtgtgtgtatcacaggttcatctattaatgagacataattgttaccatactagcccagaacataaattcaataacataatcgcggtcagctacagcattcattgaattcataataacccattcaaaaccaagttccttttgaaagaacttacgatctacggcgaaaggattaccagcaagtgcaccagcgcctaaagggagccggttgactctagaataaatttgtttcaagcgatacaagtcatttaatatagaaaaggcatgggacaataagaaatgggaccagcgaataggctgggctctttgcaaatgagtgtaaccgggcataatgatatcaaggtcagactctgcacgagcaacaaaaacttggagtaacccaactaaagatttttggatgatgtccaactcatcacgtagccaaaggcgcatatcggtcgtaacttgatcgttgcgacttcttcctgtatgaagcttaccagcaatgcctgcagcacgatccatgagatcgcgccgatcaggatgacgaggcccaccccgacgatccagagggtgatctgcacgaagcgcagcgtctgcgcttcgctcgagaggtcgtagccgaggtagagctcgtaggctccgacctccggcaggatgatctgctggccgacgacgatgcccggctcctcaccgccgcccgacaccgtgaacccgacgggctgccaccactgcagctccgcgtcgctctgcacctgctcgcgcagctgctcgctgatgagatcggccggcagccccgccgagtcgaagtcctgcggcgcgatgggcgacgggtcggaggagatccggaatgcggcgatccgttccgtggaagactgccgctggatcgaggtgcggacgctctccatgagattgtcgatcgccaccacatcgccgcccacctcggcggcgatgtgggtgccactgctggccgccaccggtaacgctgcgcgcggtgcgggcaaggtggtcaacccgcacaccttcctgtcgatcagcgcgtcgattgcccaggtcaacaacatcgcccgcgaactgggcaagctcgacccggacaatgccaagacttacacccagaacgctcgcgcctacggcaagcgcctgcgccagatgcgcgccgacgccctggccaagctgaccagcgcacctaacccggacctgcgcgtggccaccgtgcacgcggcctacgactacctgctgcgcgaattcggcctggaagtcacggccgtggtcgaaccggcccacggtatcgagcccagcccgagccagctgaaaaagaccatcgacgaactgcgcgcgctggacgtgaaggtgatcttctcggagatggacttcccgtccacctacgtcgagaccatccagcggctcgaccttgagttcgagcgtggtggcgccgtcggtgttttgcggcggcggcacgttggcggccaccttgatgcccggcagtatgcccaatacattgatgtaacgctcgaaggtggcccgccgcaatggccggtcctcgcgaatatgttcggcgattgcgcggatcttctcttcttccttacccgggttgccggtgaccttcacttccgacacatagccttcgaccaccgtcacacgcaccacgccgttctcgaagttctgcgcgggtatgaaggcaaatgacagcgcgtagccgcgtgactgatacagcttggtgacgccgtcggccacctggatcaggtcgccgatggtgatgtccttgccgacgagcggggtgaagcgctgcgcaacttcgttgaacgaaatcgttttcacgccttccacctgaaacttggtgggggtgagagggcggcacctcggtcgaggtggttcaggacaaggccttgggactgccgccgctcaacaccaatctcgcgcgcgagatgatgagcaggacaagggtctggaaactgctccagggctaccgcgaccggccgccggccgccatcgatcaggtagccctgacgctgatcaagatcagccagatgatcaccgacatagcggagatcgtcgaactggacatcaacccgctgctggcggacgacgccggcgtgctggcgctcgacgcccgcatcaaggtcgcggtgccgaccgtccagcccggcacgcggcggctcgccatccggccctatccgaagaagctggaagagcgggtcaaactgaacgacggccgcgagtacctgctgcgcccggtccggcccgaggacgagccgatcgtccaccagatgttcgagaagatgacgccggaagacacttggggctgtggtcggctcggcattttgtcgaggtcaacgattccacccgcgtctatccagacttcgctcgcctatacggcgctcaactgctgggcgtggacaactggctgagtcaactcggggtgcgacagcgccaacgacgggggctggggttggagtttcaccagttgcgcgaatttcgcgaaggcgacagcctgcgccagatcgactggaaagccactgcacgccagcgcacccccatcgcccgcgaatatcaggacgagcgcgaccagcaaatcgtcttcatgctcgattgcggccgacgcatgcgcagccaggatgatgagctgtcgcactttgaccacgcgctcaacgcctgcctgttgcttagctatgtcgcgttgcgccagggcgatgcggtggggctgtgcacctttgctggcgaacagccgcgctacctggcgccattcatttctcccctacagacctgtggaacagcagcagctccactcagctctctttacctaatcttctcactccaggatccaagctgagggagcagccttcatctcagatgtgctgttttcctggtagaggacaggagcaagaggccaaactggccagctgaagttcaatgaaagcttctgctcacacatagcatattttaggtccatttgcagtcctttggccaaaacaagtcacataaccaagcctggcatggcaagggaacaaatggttaagcatccatctggtataagtggctcagtgatgccatcaggaactccaagtcattccaaatctttatctatttctttggtagtagtttagcatttatactttgaaagacagttttttccttcctaacataactgcctctgagtggactggcaccaaaggaatggcagtaatggttattgaagatgactccgatctaaagaagaaagtttcagcaatagaaatgacacagcagagtcttcgttctgaagtcaatgcccttggtgaaactttcttctttagatcggagtcttcaataatagtcgtaggctgaacttgttgtatgggagtggtggttggtattgtctgtacaggttgtggtgttgctacctgtgtcaccggaggaatagcaggctttgaggttacttggctggatttatctgagaaaaacatccaaccaattattttatacatcaccattataagtacaactgccccaatagcaataagagcatttcgcttaatatcttttttctttgttaatccctctttcccagattgaatcgaagcttctgaatcgagatccgattcaccagcctgatccacctcgtatcccgtcttcagcttcaaaaacaaacacaaatgctctacgagctcaaggaacgcgagattctcaagcggcgtatcgacgtcggtttcgtgttccagaacttcaacctgttcccgcacctcaccgcctgggaaaacatcgccgaagcgccgctggcgcacaagcgttggcgcaaggccgaggctcaagccaaggcgtccgcactgctggccaaggtcggcctggcggacaagctcgatgcctacccgcgccagctttccggcggccagcaacaacgtgtggccatcgcgcgggccctggcgctggaccccaaggtgttgctgttcgatgagcctacttcggccctcgacccggagctggtgggcgaggtgctcgacgtgatcaagggcctgacccaattgggcgtgaccctggtgatcgtcacccacgagatcgggtttgcccgcgaggtagccgaccacgtggtgtttctttgcgagcccaagcttgtctcgaactcctgagctcaggcaatccacccatcttggcttcccaaagtgctgggatgacaggcgtgagccactgggtccagccccatgttcttcttacctgcactgagatggtcaaatgaaactttgcatctgtactctgtgcagacaggaactgtgtccagtttaaatgggaatgttcttaccggaggctgttaaagaatttaaggccagcacagtggctcacacaggtaatcttagcactttgggaggccaaggcgggaggatcacctgaggctgagtttgagaccagcctgggcagcatggcaagaccccatctctgtgaaaatagacaaaattagctggacgtggcggtgtgtgcctgtagtaccaggtactaggctgaggcaggagaaccacttgaacccaggaggcagaggttgcagtgagccaagacatctgccccttatagctgaagtgcggcgagccccacttcaccgtctcttccacccccgggcacgcggcatgaacaacttcgcgcaggtgctcgagaatcggctgggcaaagggcttctgcttcgcgatgtacgcgtcgatgcgcggatcacggtcagccatgactagtccctcagttcctcggtgtggccgatctcgagtccgagctcggtcagcaattgccgcacgcgcggatcgtttccatggcgcgtcagcgccggctcggcaatgaaggcgctggtcgcatagccgcccggcagcgtgaggcatcggcgcagcagcgggatcatctggttcacgtcgtcgagcaacgcgtagatctccgcaccattgcacgcggtagccgctgcctgctggccattcggccaatcctgcgcgaacggctcgcgctccacctgcatcatcgcggctgtactcggtgaggcgcgccttggccgggcgtgcgccattttcgtatttgccgctgagcatgccgaatgccagcggtgaataggccagcaagccgcattgctcgcgaatagccacttccgccaaacccacttcaaagctgcggttgagcaggttgtaggggttctggatcgacacggcgcgggcccagccacgggcttcggccagggccaggaacttcatggtgccccacggggtttcgttggacaggccgatgtggcggatcttgccggcttttacctgctcgtccagcgcctcgagggtttcttccagcggggtcaggttgtcttcgtccttgtgcttgtagctcagttggccaaagaagttggtgctgcgctccggccagtgcagctggtagaggtcgatccagtcggtttgcaggcgcttgaggctggcatccagggggtcagacgaactttttttgcaaggggccgtcgggggtctgcccgcagatgaagaaggccgggcagttcgggcaggtgcgcgacgaaacctcggccggaaaccgtccggcgcggatgtcgccgagaaactttgcgagcttgtccttgcgccccttcagctcccgatcggacaaggcaagcgcatgtgcctcgccgtcggaaagatggacgagctctgcgaccgcgccgggaaaggactgcctgaccgccagcatcagcgccgccgcgccgacatccttgccctcggccgaccgcatgtgacccgtgcgaatgcggcgcacggcgcggatgccgtccggccgcaccagcacctcgtccggccgaacgatgatctcctcgccgccgaaactgaggctgagcgcgaccggcgcttcggggactgcttcggcgcggttcgccaggaagagacggatggcggcggtcgccgccgaacaaatcgcgggcggaagtgccgtggtgaagatgaagccaggcgcatgggagcggatcgcatcgatcacattggcgttgcccgcgatgtagccgccgaggcatccgaacgatttcgcaagcgtgccttccagaagatcgatgcggtccatgaccccatcgcgttcggcgatgccgccgccgcgcggcccgtacatgccgaccgcgtggacctcgtcgatcacatgcttccagccggccagttcctgttcgccgtggaagcgtgggacgttcttgtcgttgagcgaagcggggcggtccacgccggtgccctccgagacgatcagtccgacatcggccgccgcgcgacgcttgtagtactgggccacctcgtccgtcaccacgccgccaggcgagaaggagcgcgtcatcggcgccatgacgatggcacatgtaccctcaggcgagagtggttacaagcagtcagcatgatcgaagcgcttgttttcacatcgcggaggccgtgaatcggttttaagcagattggtttcgaagggggagaggaccgaccatgaacctcgaagaactggagccgaccaagaagccggcgcccaaaaaggacctcactgtgctgtcgatcgacgaactgcgcgattacatcgcgacgctccgcaccgagatcgagcgcaccgaagcggcgatcgccgcaaagcaggcccatcgcagcggggcagaggcgtttttcaagaagtagcgggcttcaagaaagccttggcttcaggaatgacgaggccagcaggaagcaggcaccggcgagccctgcggaagccatcaggccgccggcgggcagatactgcatgaaggcgccggaaacggcagggccgaccgccgtgtgccgggccctgtcgcaaacgaaataaagtcgctgggtcattattaaaagtcgggatgtgcgcccagatagtcagtcatccagttcaggaaggccttcactttggggatctcgccggcatgctcggcatgggcgataaagtgcgcgccgtcgctgggcatcgtgtaatcccacggaatcatcaggctgccgttggccagttcttcagctaccaaatactgcgggaccaacgccacgccataacccgattgcgccgcgcggatacacatgtagaacgtgtcgaaacgcggcccgtggtagctgttctgcgagtgcaggccctgttccaggaaccattcgtgccaggcctcaggacgcgaggtgcattgcagcaacgtgtggcgggaggaggcatcgctgccctcggcgacaaagcctggtgcacataccggcaccacgggttcaattcatcattcatcaatattcaaaatagttttccctaaaatgaacccctaaaagcctatttatagttttaggcattattacatagatgggcccaaaagtgacccgaaatggccaatgggctagctaagtcgggcttgcccaatcctcttggcgagttgccgactggtcggcgatatgcatgctcacttggatcctccttgaatggattgctgtaactttcagcggtctgggggtcaatgggcgatgcgctgaatgtcctccatgctcaccgaatgggaagccttctcttgcaactcatagggccattgggccatcctgaaaccctcgccaaagggctttggtgacgcgctgaagtgatctccagctcaccgaatggagcagtccttcacttgctccaagctatcatccaagcatggtgttgcccaactgggagctacttatgttattgaacagcaatggtagaagcattggcatcaaaaacaaaagcatgggaaagtgagagggggatcgatttcacttatgatggagtatgtactctccacttttgtcttttaaaactatttcaattttctggtataagttgtgcaggcacatgagctttcccctcaagtttttgatttactttctactagatccgtcttcttgctatgcttgaagagtataacatcttacgacaagaaaaggaggaagaacgtaaaagacaacgagtatgaactgaactctcaattgactttttgttgaagctataaaaatctttgcttatcattgatgagtcggtcttctaaaaccttcacatttatctcaactcaggaccagaagaaacttcagggacaattaatggcagaacatgaagctatctatggctcaaagcccagccctatgagcttgccagagcttgtattgccaatcaaagcaaaaatatggtggaatcggctaaaagctgggcaatgccacctgcgtggtcggttaaacaaatccatactgtgcatcatcaacaagttttgatgcaaggcttacaaaatcccaatggcatgcttgcgattgtgccgcatttggggacatgggaaatcatgaatgcgtggctcaaccagtttggtgcaccgaccatcatgtataaacccgtgaaaggtgaacaagccaatcagtttgtgctgcaagggcgtcagcggctgaatgcaactttggtaccaaccgatgccactggggtcaaagcgatttttaaaaccctaaaagcaggcggttttagtatcatattgcctgaccatgtccctgacccatctggcggtgaagtggtgccgttttttggcattccgacattgactagtacgtttctagcattgtctttcgactatccctgatcctgtcacttgaacggttcaatctctctgttgacatcatcaacctttgcctttgatcagcagacacctgtatggcattagatcaaaattttgatcaagcaagagcataatttccaatgaaaggtcaatcaaaaagtgaagaagttttcactctcgcataagatatcctgacagtacattgataaaagatatgattgctcgaaaagaagactcaagcaacaagcttgccataggggactttataacttcatgtttctccttccaatttatatgaatattctttccttcatgcaacattccagacgtatttgacaccattccacaagtaatcatattctataccactttcacaactttcaagattataaactcatttaaatgtttagattttaactcgaagagaagtttctctaatgtcagcctccatcccgcgcagtaaaaagacgtaaactttcccgggatgctgccgatattattccacaactgctggatgaacagatcgaacaagctgtttaacccgaacgtgtgggcaagattccagcagcggtaagccattaccgctgcttttttttaccctgaattcggtaaacgctgcgagctgaacatccttgccatagtcactagcggaaggatgatgtcgtgcttatcttattaggttacctggtagttctcggtacagttttcggcggttacatgatgaccggcgggcaccttggagcactctatcaaccggctgaacttattatcatcggcggcgcaggggtaggggcttttatcgttggcaacaacgggaaatcgatcaaggggacgctgaaagctattccattgctgttccgtcgctcgaaatacaccaaaagacctggtggtgtacctgaagcggcccggcggccagtcgcagttttccgtgcacctgtcgagccagatgacgacccatcccaccatccgccagttgcagggctggatcatggagcatctggccgacgagctcacggtgcccttgctggcggcccggctggccatgagcgagcgcaatttcacgcgcgtgttccagcgcgaaacgggcaccagccccacggaattcatcgaaacggcccgcttcgaagtggcgcgccgcttgctggaagacaatgtgtcgtcattgaaacaggtggccgcgcaggcgggcctgcacagcgaggaaaggctgcgccgcctgtttcagaagaaactcgccatcaccccgcgcgactaccgcgagcgcttttccagcacggcgcgctagcggcagggcgagcaggacgaatcagcgcgacttcttgctgcaatggaacagaacagaggcctcagaaataacgccagacatctacaaccatctgatctttgacaaacctcacaaaaaaaagcaatggggaaagaatttcctatttaataaatggtgttgggaaaactgactagccctatgtagaaaactgaaactggatcccttccttacaccttatacaaaaattaactgaaaataaattgaagatttgaacataagacctaaaaccataaaaaccctagaagaaaacctaggcaataccattcaggacataggcatgggcaaggacttcatgactaaaacaccaaaagcaattgcaacaaaagccaaaattgacaaatgagatcgaattaaactaaagagcttctgcataccaatagaaactatcatcaatatgaacaggcaacctacagaatgacagaaaatgtttgcaatctacccagctgtacaggcgtggcatgaccggaaagtggaaggccatctggcattcgtcaccgttgccaaaatactcgacgacgtcgtcaggccactggttagcctcgcacagcagaatgcggcccgggtactcttcatcgaccatggcgcgcagctgcttgaggatcttgtgagttcctggcaagttttcgcagttcgtgccctcggcctcaatgaggtacgggacggcgtcgagtcggaatccgtcaatacccaagtccatccagaagcggacggcgtcgagcatttcctccataactcgaggctcttcaaagttgagatcgggttggtgatggaagaaccggtgccagtagaactgcttacgctgggaatcccaggaccaattcgagtcctcggtatcgcagaagatgatgcgagcatcggagtaggcctcgtcggtgtccgaccatacgtgtgcgcgggcttttcattgtcgaaatggaaggtctcggcgttatgtccgatagtgtggatgccttccatcaacgccacccaatcgttgccgccgcgctgcgaggcaggcaacgaccaattctcatcataggcgggcgggatcgggttctgagcgaaagcatggagaatgtcggtgagcatcagttcctgatgctgctgttcgtggttgaagccaacctccatcagtggcgtgatctcgcgcagcttcgcatcgctggcgccgccgaggaatttttccatcgccgcgtcgacatgcgcgcggtacgcggtcacagcctgtgcgccggggcgggtgagatggccgcgctgcgcgcgggcatgccggggaccggcgctgacgtaataggaattgaacaaataagcgtagtcgggatggaaaacctgatagccggggacatgctggctacctagacaccggcacggcgaaactcatcatccgcgaattcccgacgagcgaacgcgcgctggtcgcgcacatgctgacgcgctgtgcggcacccgacaaggcgccggcattgctcggcgagctgtttcacaagcaggacgagtgggcgttctccgacggcgatccgacgccgaagctgaaggaattcgcgacgggcgttggcggcatgacgccggaagccttcgagacctgcacgaaggatcagaagctgttcgacaagctggtggcgaactttaccgcggccggcgacaagttcggcatcaacgccacgccgacatttttcatcgacggccgccgcgtcaacgacgccgccacgatggaaaccttcgacaagctgctggcagagaagaagtaggcgggcgggctggggggcgtcccggcaatcgttctttgcctctgagggtataggcctccgcaatgctgtccttggaatcgatgatgatgccgccggtcgggaagtccgggcccttgatccagcgcagcagcgccttggacttggcgtccggcttctcgatgagatgcagcgcggcgtcgcagagctcggcggcattgtgcggcgggatcgcagtggccatgccgaccgcgatgccctgcgcgccgttggcgagcaggttcgggaagccgccgggcagcaccgccggctccttcgcctggccgtcgtagttcgggcgaaactcgaccgcgtcctcgtcgatgccctcgagcagcaggcgcgcgacgtcggtcatgcgcgcttcggtgtaacggtaggcggcggggttgtcgccgtcgatattgccgaagttgccctggccgtcgaccagcgggtagcgcgcggcgaaatcctgggcgagacgcaccagcgcccctcacccaattcgctcatccgcgctcggacaagtccgacatcgccctcctggcccacctcggcgaagaggccatcggcggcgccgaggtcaacatcgtcaccgatgctcctgccaatgtcgagatcggggtcctgcccgcccaccggcgccagggacatggcacatcgatcgccggagtcgtcgaagatctgctgcgtgaacgcacgaagctcgtccagaccgagacctactgcccggccggcatcgccttcgccgaagcgcagggcctgagcatcggaaatcaggaacatcgactcctgctggatttgccggcctacctgcgcgatgatgcgaaccgctacaagaaccctgatgcgaagtcgcgactgacgacggatcccgatccgaacctgtcgatcacttcgtggatcggtgactgcccggacgacgcagtcgaggatttggtgatcttgacgttctcggtgtaggtgccggccttgaccatgatcgcggtccccggcgccgaggcattcacggccgcctggatggtcttgtagggagaggatgccgaaccggtcgccgtcgcgttgttgccggtcggagaaacccacttgaaggcgattggcttggcgttttcgtaaggaactacagttgccgccaaagcagaaatgccgagtggtaaatatgccatttcacaagccctataactccaatttggaggtaaaggctcgcaaaatttattacctaattagtttatacgcaaaagtggtagtaacgaaagctcaaaattgacacagttacctggcatcgtcttctatcggttcgccgctggctacggccgatcactggccagcgctttcctccagcgccagggtgcggatgtcggccagcaccagcctgggatacttacaacctaacttacgtaatcgaaacactctattgagggtgaaaattgagtattataagaaaataatcacctgttttgtgagaagttcaatacgtaatgctcctccacacaatacataccttagaaagaaaaaaggaaacatacaaaactatctcgagaattattcctgcttaaacaatttctacatgccattactaagaaagtatgcacacagtaaacattagaagagaacatgcaagcatgaacatacttgttagggatacaggactatgggtaacttaaaaactctgttggtattactctcatgtaattgctctgaaattctagtcaactatttgcaatggctcttagaacagaatactttgaatttttatgatatcaaaaactaagaacttagccaagtattcccaagaataggaatagtaagcatacttagtaagggcgtgggcggtagggtcgttggtagacgtaacgcggttgcagccccggcccactacctcaccatcgcgcacgatgacgcagccaaacggcccgccctgcccggtggtcatgccctcgcgggccagggcaatggcgtcgcggataaactcttcgtcggtcttcatgtgtttgttaagcgcgaaacttatcggatgggcaataccatgcccaccccgttcggcgtggcggccaacagcagtttctcctgcttgtcgccccgatttttgaagatgaaataattaaccagatcgaacgccagcaaaaaaccgccctgcaccatgaccgatgagccgtagccccgcagttggtcggccttgtcggcatgggtctcggcacgctggcgcagatacgccccgcccactacataggctacgtccagccctgaattgagcagcagaatctgctgtagcgagggagtctacgcgccataacacagacactcagggcatggtaagcgacacctgcacctaacccaattgcggtgttcagacctgccactctgggtcgggaaccgcgtacagctccctcgaggagggaagttccggccaggatcacagtgggatagtcgtgataccaaccctctgcaggatggaaagttcgtggccactttcggcggccgagagttaaaagttcaggacctttatatgtccacccaacatgggcaatcttcgacagtgatgtcacttttcggcgcccaggagcaccacgtacaaggtcgcgtcgtcgatcccgttatggtcgggaaggaccgcattcacctcgttatccatgaacccgccaaacactcgagactgaacgtcgatgctagtcgcgactgtaataaggttttgagcaacatgtccagcgtctacaccgatccgccctacaacaccggcaacgacttcgcctacgccgaccgcttccgcgacggcagccacgccgacccctacgccggtcggcatgccgcgtggacggcgatgatgcacccgcgcctggaggccgtccgcgaggtgctggccccgcacggcgcggtcttcgtcagcatcgacgacaacgaggctgcgcacctgcggctgctgatggacgaggtgttcggggaggccaacttcctcgcgcagatcgtcgtcaacctcaaccccaagggccgccagctcgggcgcggcttcgcgaccagccacgagtacgtcctggcctacgcgcggcacctgccgtcctgcgcggtcgacggcagcagcgccgagtcggtggacgaggccgacttcccgctcagcaccgacgacgggcgtcgcttccgctacctcccgctggccctgctgggccggctgcccggtggctgggggcaacgtcaggagttggagcggctggctccctcgcacctggaagtaccaaccggttcccgcatccggctggattacgcggaacccgccaccccggtgctggccgtgcggctgcaagaagtgtttggcttgctcgatacgcctaccgtggccgggggccgcgtgccgctcaccctgcacctactcagccccggctaccgcccggcccaggtgacccgcgacctgcgcagcttctggaccagcagctactttgaagtacgtaaggaactgcgcggccgctaccctaagcactactggcccgaaaacccgctggaagcccaggctatccggggcacaaaaaaacagaatggcctatagctgccgcttaaaatagtcctgttcgcgccgttccatctggccagcttacccgttccgcatccgcgatggccttgtgatcgtggccgtcgatccgctccgcgttccagcccgccgcctcgaagcgtttcacctgatcgaccgagtccgatagcgagatcgcgccgtcgatcgaaatgccgttgtcgtcgaacagcacgatcagccggttcagcttcagatgtccggcaaacgcaatggcttcctggctgatgccttccatcagatcgccatcggaggcgagaacgtaagtatgatgatcgacgatgtcgccgccgtattcggctgcgagatgccgctcggccagcgccatgccgaccgcggtggcgatgccctgacccagcggaccggtggtggtctcgatgcccggggtgaggaaattttccggatggcccggcgtcagcgaaccgagttggcggaaattcttgatctgctcgatggtcatcgtcgcattgccggtggtcccgatccgatcccgcagcatgaggagatcctgctcgtcgtgggctggcaactcgatggtgcgctgctcgacggtgccggaggagaggatcacgacgacgaggactcgatcgaccgacagactcaccagttccaggtgacgcacggtggccgagctggtcaccggatactgcatgatggccacctgacgagtgacctgggccagcaatcgcacggttcgggtgacgatgtcgtccagatcgaccgcaccattcatgaaggtggcgatggccctcttctcaggtgcggagaggggcttgaccgttgcaatgcgatcgacgaacatgcgatatcccttgtcggtggggatccgcccggcactggtgtggggatgggtgatgtacccctcatcctccagaacagccatgtcattgcgcacggttgccggtgagaccttcagacctgcagaagcggaccgatgtgcagaacatcgacatgatgaatctggccggcttttgccgcaattgcctgtcgaactggatgaaggacgcggccgacgctaggggcatttcgctgacccaggacgaaagccgcgcggatatttacggcatgccgttccagacatggaaagagaagtatcagacgcccgcttcgccggaggcgattgaggcgatgaagaagaatgcggccggacactgattggtcccgtgctgcatttggctgaagcgacatcgcaggcaagacaaatcggcgcgaaaaagcgttttcgagcgaagtggatacccgtttgcgtgaagaaaacgcgttaaattataaaattctagcgccgatttttagattcgcgctgttatctgtgggtcgctgtggatgacaatcgcgctcgccttgacggcagcggccgcacctactgtcccgaattcgcgcgaggattcgtcagcgcagcacgttcagaagatcctgcaccatctggttcgaggtggtgatgaccttggtgttggccgaataggcctgctgggtcacgatcagtttggtgaactcatcggcgatgtcggtattggagccttccagcgatgcgccgacgatggtgccgcccttgccgaatagcgccgggccggattcgtcggtggcttcgaacgccccgccatcatcgcgcttgaggaagttgctgccgttgaaggtggcaaccgtgatctgcgcaaggtcgatgctgcgaccgttggaatagtttccgacgacacgcccgttgttgctgatcgacaccgtttgcaatgaaccggccgggaagccgtcctgctggatctggttgacctgaacgttaccgttggcgtcggcgaactgggttatacaaatgggtggtggtggggaaggaggttgtcgagcggtcatcggggttggggagatcgacatttcatcgagatgatcgaggaacggatatcgaggacgtgcaagtaataccgaatagtagattgtatgcgatcagcctctaatctcatattagatcgcaacatagcgggtacttgccggcatagctaccgccgacgacgatgatcggatctcgaggatcggcgtctgggttgacgagcgtcttggacattgacgtgcggatgtgagttcgtttgacgacagggcgatgaaattggggtttggttcgtgctgggtcgataggatgcagctctagcactgcgcaagctgcaagctggattgtggtctgggtgtttgttaatcgagtattaccacgaacatgtctgaatcgaccgattgacctagatatttcttggggggggggggtcctggatgtgatcaaaggtatctcccagcagacgaacctgctggcactcaacgccgcgatcgaagcagcacgcgccggtgaggctgggcgtgggtttgccgtggtcgccgatgaggtacgcaacttggcgcaccgtacgcaggaatcggccgaagaaatccataagatgatcacctcattgcaagtgggctcgcgtgaggcggtatccaccatgaatgccagccagacctccagcgaagaaagcgtacaggttgccaaccaggccggtgagcgcctggtcagcgtgacgcaacgtatcgtcgagatcgatgggatgaaccagtccgtcgctgcggccaccgaggagcagacagcggtggtggaaaccctcaacgtcgatatcaatcagatcaacctgctgaaccagcagggcgtgaccaacctcaatgaaacgctaaaggttgaagtgcagcaacatgccactggcgcgcgcttcacgcaccatgcccggagcaattttcaaccactcgggcgcgccactcaccggcacttgcagcaccgccgcgtgggcttcgctgacaatgtagcggttgccagcggcatcgcaggtgatgccctcaaaatccaggtcgccaccacgaatgaacgaagcggccttggtgcgcgaacgcaagccccagggcaacccggactccggcaccggtggtacctcgattttcaccgtttcggcctgccaggtcggcgcactgatatccaggcgatagatctggtcgtcatcgcggtcggaaaccgtccacaacgccttgccacacaacgcaaggcctgacaggttcccgccgcgcatgccgtccaccgggtgttcagacaccagtttcaactcagccacgggcgcggcagccaccggcatgttcgagatgaacgaggtgtaacgccttaaatgcaagttcctctatctgggttcgggtgtgttcgcgaaaaacatgcctgataccgagctcgacattttgctgacatgtcagccagggcaggagcgcgtgactttgaaagaccacggccctgtcggggctgggacccgtgatcggttcgccgccgaacgcgatggtgcccgaagtcggctggagcaaaccggccacggcattgagaagtgtgcttttcccgcatcccgaatgcccgatgaggctgacgaattccccggatgcgagcgtgagcgaaaccggattcagggcggtaaagaattttccccgcttgtccggatatgaaatcgagacacgatctatgacgaggttggtcacggcgtcactcgcgatagcttaaaagcacgctaaggcgcttcaaacctacatgtgtataagaatgctgtgatttttgcacattgattttgtatcctgacagagaaccaaatcatgcatgaactcccattcacaattgcttcaaagagaataaaatacctaggaatccaacttacaagggatgggaaggacctcttcaaggagaattacaaaccactgctcaatgaaataaaagaggatacaaacaaatggaagaacattccatgctcatggataggaagaatcaatatcgtgaaaatggccatactgcccaaggtaatttatagattcaatgccatccccatcaagctaccaatgactttcttcacagaattggaaaaaactactttcaagttcatatggaaccacaaaagaggccacatttccaagtcaatcctaagccaaaagaacaaagctggaggcatcatgctacctgacttcaaactatactacaagctgttccagtcgggcgcggccgaggcgatcctcgcgcggacgaacttccccgaagacgtcgcgatcgagtcgtcgatggtctcgcgggcgatcaagagcgcgcaggcgcaggtcgaggcgcgcaacgccgagatccgcaagaacgtcctcaagtacgacgacgtgctcaaccgtcagcgcgaggcgatctacgccgaccgccagctcgcggtcgcccgcagcgtcatcgccgggcaccggggctggatcggtgcggatgcccgcacccgcctcgccgaagccgagagcctgcgcctcgggctggccccgagcggcccgatcgacgaagacgaccgggagaaggccctcgccgatgcgcggcgctgcgccgccctcgcgggcgaggcgttgcacctcgcccagcgcgacatcgacggctcccgccccgacgacggctggggacgacacacagtatcgcagcggccgggccttccagggcgactgggagaaggctgagcgtggccctcgcgcgatggatacgacgcgtgaatacgttgacggcggtcagcaacgcgagccgattaccgaggggcagcgccaggcgaccttgcgcctgaatcgtgccgaacatgagcttggcgccgacggttcggcgctggtgcacgacgtcctgatcctcggcatgaccatggagcaggtcgggcagcgacgcggattgcgtacgcagcgctggcaggactattttgcgcggcgcctcaaggaatgcctggatcggctggcgctgacgtacggacttgcgaccgcgaaccgggttcccggaaagcaccgtcaaggctgacttgaggtgacttactcacgtgccggttgccgcgcagcatccggcacggcaacggctcatcgcgagttgcaccacctcttcaagctttatcaccccatcaccaaccgtttgatgcgcaacagtttcaagccaccgcgcatgccaatattaatactttaaaaggagtcaactcgaacttggccaatgctgaccagctcgaaaactcctactgggcattgaacgatgaattttgggttgatttgttgtgtacagagtctgacagactcaacttttcaagcaacaaccataataactcccagattaatgaagaagtatttttcatgaattaacgaatgagtgaatgagcgtagcgaatgaacgaatgaacgaatgatcaatcaaatatatctataaacaatcagatctaactatgaacaactagatctatcgatgaaagatcaggtctatatgtgagtgatccgagttttcggtaaattagaaaccacttggatcccaattatatgttcagacaaatcgcgcagttgatcaaacgagccgaagcgggcgcggtctgccgggatttctgcactggccagccatttgcccgacatgaatttaaagaaatcgtcttgcggacgtacgctgctgtctatccattgcagatcgatgcccgaactgagtgcgcgagcgttggctgtggcgctggctccagtattggttgccgggctggcggattgggcaaaggcagccggagtgccagcagaaatcgcagccagaatagccagcgaaagcagggtgcgttgcatagaaatttccttattctgaatatgaaaaatataagatgttccggcgacaagcgggagacttgcgcagacaggattgtgaccccgggaaacccaataagttcgttttgactgcggcttttcagcttaaccggtctccggcgctgcggaaagcggaatctgccaatgctcgggctccggcgccggcaattgctcgccattgacgaggcggatcatccggtcgacgccggccgagatgcccgcggcgaaatcgccggccttgaatttcggcgtgatgtcctcgtcgatgatgcggtgggtgacgacgtcgctcagcacgccttcgaggccgtagccgacctcgatgcgcaaatgccggtcgttcttggcgacgacgaacagcgcgccatcgtcgaccttcttgcgcccgatcttccaggcctcggcgacgcggatcgagaactgctcgatggtctcctcagccgtcgtcggcacgatcagcactgcgatctggctgcccttgcgggtctccagatccctgagtttgtcgttcagtgacgcgatatcgcctgcagatagcgtgccggtctggtcgacgacgcggcccgtgagctgaggctcaaaaaccataataaaaatatcggagtgcttcatgaaaacaacaataaagctgggcctcattgcgtcgtgtctcaccgcaccttttaccgctcaggccctggagtttgccggttacctgcgcagcggcgcgggcacctctacgggcagcggcaagcagcagtgtttccagctgccgggggcgcaatccaagtaccgtttgggtaacgaatgcgaacagtacgccgagctggaactgcgccaagacctgctgaccctcgacgacggctcggtgctgagcgttgatgccatggcgtcgctgtacaacaagtacgaccgcgccctcaagttccagggcgaagacaacggctcggcacgcatgccgcagatgtatgcgcagtggtccaacctgccgagcctcaatggcggttcggtgtgggctggccggcgttactacaaacagtagacacagtcgtggatagtaattcttgatcatctaaactcattccacttaactgagacaactcgaagaaacattggaaaatccgagcaagcaagagagagcgaagttccaagtgagaataatctgaagcgggaattggcatggtaatttcaagccttttggttaacgaaaaagctttgtagaatttaaggcagttatttaggaaaataatgactcgcttcctaacatcaggtgtgaataaaatcttgttatactccaaaaacgaaagcaagcactgtaacgcttcaaaccgattaaacatgtctgcatttgtctccatgaaattttgtgaatgtatttttgaaggtactctggaaagggcattcttccataaaattagcaattgggacaattgcattctagtaaaagaaggaccaaaagaaacgtaagcgcttaataaatacaacttgtcggagatgctgaaatctgtcgacaccgtttccgggttgttgtaaataataatcgcttcatagcccgcttctttaatcgcccagacggaatgaacggttgcataatcgaattcaatgccttgtccgatgcgaatcggtcccgatcccagcaccacgacgctttcgcgggtggtgacggtcgattcgttttcatcttcgtacgtgctatagtaatacggtgtttctgattcaaattccgccgcgcacgtatccaccatcttatatacaggaaggattcctgcttgtttgcgcatctcatacacgccgcgctcgcttatgttccagagcttggcaatggctacatcggaaaagcccatttcttttgctttccgcagcacttcgatatcccctgcatggtcacggatgaccgtttcgtaacggatgatgtagaaggaatacgagtcgcgatcccagaagtatcggtgatcatcctggcaatccagggacagtgggactgggtgtgccaggctctgcgccaacgcctagtgaccccggcctcatgccgggcggcccgtaaagccctcaccggccggtactcgaaggccgaagtcgaccgtgcgctagccgacatcgacctaaatccttggtcgatcccggagctggaattagcgcgaatcctacgggcaaccgggatcactggtcacaagccgaaccaccaagtgtgggttggtgaggggaattatcgctatgtcctggatcaagcgttccaggctgagatgctgggcgtggaaatggaaggccgctcggtccacggcaccccggaagggtacgaggcgatgatggtgcgttcggcccatctggagcaggccgggtggagaatcctacaccactacatgatcgaagacagcggcatcggcctgctgctcagcgatgcggcgatgttcgaagccctcggcgagttgccggctaccgtggcctgctggtgcctggaagatgatttgccggtgctggccaactacccggccgatgcgctgccgtttatcagccttgcgcaacatcaggcgtacttgatctacacctccggctccaccggcaagccgaaaggcgtggtggtgtcccacggggaaatcgccatgcattgcgcggcggtgatcgagcggtttggcatgcgcgcggatgactgcgagctgcacttctattcgatcaactttgacgccgccaccgagcgcctgttggtgccgctgctcagcggcgcgcaggtggtgttgcgtgcgcagggccagtgggacgccgaggaaatctgcgggctgatccgcacccatggcatcccggaggctgccatgcaccccgagatctcccgccgctacggcgagcagcaccgcgcggaactgcaccggcaggcggagcggtggcgcctggccgcgcggccgcgccggccgaggccagcccgcctggccatgctctgggccgcggggccgttcgcggcccggcgagtgccggcgctttggcgccgtcgcgggcacggcgcaggcgcgccgcaggccgcgccgcttggcgtgtttctggccggcccggatgcgttcggcttccgcacctacctgaccaccgacgaggcgcaccagctcgccgccgactgggcggccatgctcgccaggttcggtgaccgggcggaggacccatcccgccgtcccgacgatgccgtgctcttcgaagtcgtggtgctggggcgccaagttcccgatctggtcgctgccggccgcgggcaagtgataccggtttcacagtttaggcatttggcgatgatgcgcgcgatggtggtcttgcccaccccacgggtcccggtaaacaggtaggcgtggtgcagccgctggctgtccaaggcattgatcagagccttgagcacatgggtctggccgaccatttcgcggaacgagcgcggacgccatttacgtgcaagaacctgataactcatcgaaaaccgtcgcaactgggaaacagaagccggtaatgctagcggagcaagggggaaattgcatccggcacgctcgcctaatctgactaagctctgttggctggccccgaaaaggcctgaacccggagagtgtatgcgcgtagtcctgggcgctttatggatgatcaccacggcaagcctggcagcgcccacaccgctgcgcttctcggtttccgacagctgggcgatgcgtccttgcaccaagtggctgcgaccctggctgaaaccgtgccgcaattgcagatggagtctgagaaggtcgtcgacatcctgctgcaacgcggtgccccggccagccaggtggcgttggcccagcgccagtcgttgctggccgaacgcattctgggcgcggtcaacaccgtgctcgccggcgacgaaaccgccgcccaggcggccgatgcctttggccgcgacgccaaccgattcggccaggtactcaacggcatgctgcagggcaacgccgggctgcgtatcacccaggtcgaagaccacgatgcacgggcgcggttggcggaaatcgccgagctgttcgagttcgtctccggctccgtggatgaaatcctcgaaacctcgccgcaactgttccaggtgcgcgcctcggcgagcaatatcttcaacctctcgcaaacgatattgtttgagaacatttatccaattaatttcctagaacaaatctttagccattttcaaattcttactcatatcgagcttgtcattaagatccttttctagctctgttacagactgatcgttagtgccggtatggtagccaaagtcaattaaatttagcgcttcaaataccaactcgaaagagtcaactttataattctgtttaaggaaaagggcgtgatcacatgccttatcgaaaaccctaaatattgcctgaaaaaatgcagattgagttattttttgaggcagatcgttttccaataaattagtatagacaccaagcaaataattttttattagaattttcttcttatcatattccaactcacgaactctttcactatttagcaccctattgatagccgtctcaaaaggcacatgagaaagatatccaggacttctacgacaatctgtaccagatggacggcatgtcgttcaacaacgatatcggccccgccagcagcggcaccaacgccacgccgccgtcggccagccagggctttgccgtggacaccagcctgctgtgcgacgtgacggtgctcgatgcgaacatcggcgccgaatatggccgcttcatgggcggcgtggtcaaggccaatacctgcgcgcccacgcgcaagctggccggccaggtgtccgtcgaaagcacgcgctcgtcgtggatgcaatacaagctcagcgacagctagaaggacagcgccgcccagtcggcgtcggccgccctgcagcccgagtttgaaaagtggacctaccgcgccgcgctgcagggcaaggtgacggagaatttcagcctgatcggcagcttcatccgcaagacgtcggaaattcccctgaaagcacaggcggcacgcaatgcactgcgttcgctgcagggcgcgttttccctgcgtgtgcataacctgaccgagcagttgatcagcctgcgtatctacgtcgaggcggcgattgatttcccggaggaagaaatcgactttctcgctgatggccacgtcttggcgatgctggataaagtccgcgatgagttatccacagtactgcgtgaagccgggcagggcgctttgttgcgcgatggcatgaccgtggtgattgccggtcggcccaatgccggcaaatccagcctgctcaacgccttggcggggcgtgaagcggcgatcgttaccgagattgctggcacgacgcgggatatcttgcgtgaacatatccacatcgacggtatgcccctgcacgtggtcgacaccgccggcttgcgtgataccgatgaccaggtggaaaagcaacctggccaatgcgtggtggtcgtccagcgcgtcgtatacgctggcctcgctgccgctctttgtgtggatgggcgagatactgtttcgcaccaagctgtccgagcagatgttcaacgggctctctccgtggttgaactggctccccgggcgcctgatgcacgtcaacatcctgggctgcggcatcttcggctcggtgtcgggctcgtctgccgccacctgcgccaccatcgccaagtcggcgctgcccgagctgacccggcgcggctacgatgagcgcgtgaccctgggctcgctgtcgtgcgccggcacgctcggcatcctgatcccgccatcgatcaccatggtggtctatgcggtctcggccgatgtgtcgatcatccgcgtgttcctggctggcttcctgcccggcctgctgctgatgctgctgttctccggaggtttctcggaagccgatggttcagaaactcgaagagagtttcgtttgctgaggcctcgtcaggcgtttcaagcagtcgctcgataagtgcttcgccgctgctcagtgggaccacgacggcatcgcgaacgtgagcagcaccttgacagaccacttcggttagaagtgtgtcaagctttacaccgcgcacgtagacatcaatcaggtccgggcgctcgctaagaatttcactgatagcatctgcaaatgtagggtgccagaaggcccaatattccttgtcaccgtctcgccggcgcacgaccagtgaatcagtgagttggaacaaggcctgagtcatgccggacttagtgacaccgtaacttgtagcgacgaggttggcgtcattgtccggtaaaaggtgaactggcaaccgtgattggccaaggaataccagcgtgagtatttcattatctcggttataaaggattgtcatgacataatcatgaggattaacatgcgtatacgcaatttcggctaatttcgacttacccacaatttctgcaaagggttgagaatgaaatgattctttaccgcgaacgatatagagaatctttacatctgtcataccgccaaatttgagggctacatcaaatttatctgtaacggatcgtgtcccatcaatccctgtagttgccaaggtggcagcagttccggagcgagtttcatgttttttaacattattttcttgtccggctaatagatgactgtccgcagaatattcaccagaccgggtcattttcttggcgaaaaatactgtttcttctagggagttagttaggtgcccccctctaaaaacaacaggtgcttgagtcagatttaagtgatcattttgattcattcaactgcagcgcgctaactgggaagccaggaaactccagaggaacaccattacgctgactgtactttttgatggtatcaatatgcctatcatcatcgtacgcatatttcatacagtcttcgattgcggtgaacatccgtaccacctcgcacacgcgcttcagattttctttgacctgcttattgaacttactgtcaataagcgaatgtagcgtcctattctggagccggccattcaaaaggcccagcccctctgaatcaagctcaaagaaccagaagaaccgctctgagtagacttgattgaccagatccagatcttcaatctcaacttgtttagggtctttcttgttatacgacgttcttctacccttagtctgtatgcggaattgctccgtttggaagaagatgttgaggcgttcacctcgcgacagctcatcaggggctggcctcgttggtgctaccaacactcaccttggcgattcccaccagtgcagtgatcgcccaggtgttggcgcgttcgctggcggccacctcgcggctgcccttcgtcgacgccctgcgcgccaagggcctgagcccgttgcgggtgctgctgacccatgtgctgcataacgcggtgatcccgatcctcagcctcagcggggtgattgtcggctcgctgctggcaggttccgtggtcaccgaaaccgtgttctcgcgcgaaggtatcggccgcctggcccaaggcgcggtgagcagccaagacatcccggtggtgcagggcgtggtggtgctggcggcgctgatattcatcacggtcaacctgttggtggacctgttgtatcccttgctcgatccacgcattcgcggagccgcacgatgagccttgcatgtgatagaccgctgaattcccgagcagctctaggccggtaagcatccacaccccgacggcaaatcggtttccccaagtcggcgtagcaatcatgaggccaactccggcgagcaagatcagcggggccatcacggtgtgaacccaaccacgcagccgcggtttaggaagcaccgaactacgattcttggtcttgctgctgcacccggtcgccatgcgtcgtcctcccctcacctactgcaaacctacggttcggtaggtttctttttccagcctaccttgccctatacccacgacgcgatctcgcctcataacgcgagctagcaaccgtttgtgccaggcactgactaatctggacctatgagcagcctggaccaccgcctgtcgaaggtcagtgagaccctcgaccgcatgcacccgtccggtctgctgtacaccacccgtgacggcgtgctgcaaagcatgaccggcagcaaggactgaaacaggtttgagggggagtgtggccagccagtagaccagcgccagcaggttgatggcggcaccgaggccgcacacgcccatccacccggcccaggcatacagggccgttgcgctgatggagcccagcgcactgcccactgagtaaaacagcatgtagccggccaccaatcgactctgggcgtcggggcgcacggcgtagatcaggctctggctggtgacatgcacggcttgcaggcccagatcgaacacgatcacccccaacaccaatgcccacagcgacgattgggtaaagccgatggcgacccaggacagcaacatcagcagcagggccgtgccgctggtccactgggcaaagcctttgtcggccaagcgaccggcgcgggcagcaccgagtgtatacagcttgccatcggcggaaatgcgcgcccgggtgcagctgcggcaaaatgattccgtcaccgaggagataaacccgacttccacgttggtgccaacatagcggtagcggcttgccacctcgccgaagtaggctttttccacaggttcaagtggatgcatttgttgcaaaagttcatacatttctttttttgtgacgacatgggagaaatcccagccattggtcgtgccaacatccataaattcgataaagcgaagcgtaatgccccgttccttaaaataagaagccatcgggataatttgcgagtcgttcatgccttttttcacaaccatgtttactttgacgccaagcccggcttcctgcgccgcttcaattccttttaacaccggttttactccgacgccaacgccgttcatttttttaaatatatcatactctagtcagccagcgataaaaaagctagccaatcacctttctagtcccggggaagtgacgatgaacatggctaagtctaaattgatcaaggactgttgaagtcgagcttatttttggtatgatttttgtagttatatggccactcaatccgctcttcaaaggactgtttgatttgggactcacaggttttgttcattcagggttgagattttggattttattaggtgtatgggttgttgctcgttcttccattacctgaccatatatgtgtaatcttgatttatcttactatataataagaacttcatctcattcttttctcatgactgatcgctggaaaaaaaatcctatcaaactctttttctctctaaacataaatttgaaagtctctcaagctctcctcctttctatataatcattgatagacggaaatcgccccagaccgtgaccatcgcgatgatcatcatgacgatggctgtcgtggtcatgcttccgatcccttcacgtgcgacgtcgcagttcggatggtgcctgtttccggatccgggtcgtattgctcctcgacgaggaattcgtcgtagtccggatcgtccttggcctgcgagtgcccgctccacggcatgagcgagagcagaactccgatcacgaccagcgcgatcaccattccccagccgaagatgctgaggaaccaggcggggtagccaccgtacggctccgagatcttggtgatgagctcgctgacgaggaggtagccgagcacgacgggcgcgagcacaccgaccagcaccatccagatccggcctacgcggaaactggagcgtcggttcaggtgctccttcagcaccggcagcttgtagaacacccatgcgagcttattcgaaaaaggccttgagatctatctcgtgtctggtactgcatggttccactctgcaagaaccccgaatcattctcttgaagctcatcctcttcatcataaatgatccgcttgccccgaaatgacctggaccaatagggaaatcccaattcattgggcctttcgatacaatcaaatagaaagccccaagggcgccatattctaggagcccaaactatgtgattgaataaatcctcctgcgggtcaagggctccttctccctccccttcttcaaactccgattcatatttttcatagagaaatctctgatcaaggatagaccaagagcccttttgcatcatatctaagggattcctcggttcgggccgaagaagcaatgtcactcgatcattatcaaactgactgcaatctttttctgtccgtgaagatcccgtcgagcatgatggccagcaatacgattgccaggccggcttcaaagcccagggcaatgtcggcggtgttcagtgcgttgaccaccggcttgccgaggccgtcggcgcccaccagggccgcgatcaccaccatcgacaacgacagcatgatgcattgggtaatgccggcggcaatgctcggcatggcgtggggcagttcaatgcgtgagagcaactgacggcgtgagcagccaaaggctttaccggcgtccatcaactcttgtggcacatcgcggatacccaggtaagtcaggcgaataggcgcggcaatcgcgaacaccaccgtggaaatcagaccgggcaccacacccagcccgaagagggtcagggttgggatgaggtagacgaaagtcggcacggtctgcatcagatcgagtaccggccgcatcatcgtgtagtgcccggcatcagtaaaccccgctttcagtgacttgtccagccagagaaatgcctgttctgtcgcaccatactgggcatacgcgcatgctgcgttataggcagaatcgctattcctcgcatcttcgccaaatgctttgacatacgctgcagcagcctgctcaaactgtttctgtttcaaggcctcttgtgccagcagggtataaaaacgcacacgctcttcccggctttgcttgctgtcgacggtgctggataccgcgtttgaaacggcttgctgagccaatgcagtactcgttcccaagtacatgagtgcggcacacattgcggcaaatgaagcagaaagtttcctggtcatcagaagtcctttagttttcataaaagatgataaaaatcattacatgcattgtcattttaagaacgccttccaagtataaagtgttcgtcaaaggtgatgcgtttgatcgccaggatctggcagcgctggatcccaggccgacgctggcggtggtgtccgggttgtatgaattgtttgccgataacggcatggtcggtggttcgctggcaggcctggccgaagcagtagagcctggcggttatctggtctacaccggccagccgtggcacccgcaactggagctgatcgcccgcgcgctgaccagccatcgccaaggtcaggcctgggtgatgcgccgccgcagccaggcggaaatggatcaactggtggaggccgccggcttccgcaagatcactcaacgggtggacgagtggggcattttcaccgtgtccctggcacagaagatctgaacatgcgcgaacccggcttattgaaaccagcggtcctctggctgctgctgttggcgccgctgtttttcggcgaagaccgggacagcctcaccagttctgggatcgcggcctgtcctggcctgtcgtgccctgccgaagaaactgccgaacccccggatctcgatcctcgaccctttcgcaagactgtcagtaatctcgttcagaattgcgttgagggccgcttccaccacggaccgagggagatgcggatgagtctcaacaagcctctcaatcaattgcgagcgaagcatggatcttccttttttgcgatagagtatgagcaggctcgctcaagttctgtgaggtcatgcgggtcgtgtccgggaccaagaatgatttcatccatacttagcgatgtcgttgattgccgccattgtgatcccgtctctcagcctaatagccctcattcttgctgaagcttcgctatgcagctctttcgatataatgcatgaaactcttaaaagatgaaccggtggtgtatgttgctggtgcgccagatactctggaagacgataacagccatgcagcccagcgcggcgagcatatgatcatcaacttcccgatcggttctcgccctcgcaaaaatatcgccgccagtattcatggtcatattggcgatatggacaaaggctttgccgatgccgatgtgatcattgagcgaacctataactcaacgcaggcacagcagtgcccgactgaaacacatatctgctttacccggatggacggcgatcgtctggttatccacgcctccacccaggtaccatggcacttacgccgccaggtcgcgcgcctcgtgggcatgaaacagcataaagttcatgtcattaaagagcgagttggcggcggttttggttccaaacaggacatcctgctggaagaagtgtgcgcctgggcaacacctgtactttcaattaaccccttaatcgttgctccacctttaccgataatagttcgtattttgtcttcagcaaccttcattgtagtaatgcgtggcgcatgctgggataattcttctctatgctcagctaaggcattattcataacactaagaatgtgtaagcgtccggccaaagcttgatctaaagcttgctccataatttcattggttattccgtggattttgatatccatttgtaatgcggtgattccatgttcggtaccagctactttgaaatccatatcacctaaatgatcctcatcgcctaatatatcagttaacacagcataacgatcaccttctttaatcaaacccattgcgactccggcaacaggtgcttttaatggaacacctgcatccatcaacgcaagactggttccgcatactgtagccactgtgtgacaggcaattccgccgtgctgttcaatttgcagcacaattacatcggcatcgcagtcgagacgaatttcatgtacggtttgaaaatgcccagattcttcgcctttgtgccataacttgttgcgtgaacgagagaaatatacggcttggtttttctcagccgtcaaagccaaagcttcacggttcatccatgcaaccatcaagacacgtcccgtttggtgatgctgtgcaatggcagggactaaaccttgttcgttaaattttacttcatcgagccattgcaaattgttcataagatttcaccaagcgaataaatattgagagtgttacgatgttaacgtagcgcgctatagtctacgtgatttaaacagaatagaggagaaactttctacagttatctcacagcggcttaattgatatattttagaaatcgtcgatcatggcggcgtaagattgcggcgtcacatcgatgccgccgaacctttccgccagcgtcacgacaccgagcggcaacgacacccacggccccttgaccggagccgcgtgcgattgcccctccggccgggagattttcatcacctcggttgagcctccgccgatatcgaacaggatcgctcccggcccgcgctcatcaagcagtggcgagcagcccatcgcggccagcgtcgattcagtttcccggtccacgatttccagcgcgatgctcgtgtcccgctcgatgcgcgccaaaaaggcgtctgcgttgtcagccgcgcggcaggcttcggttgcgattgcccgtaaccgatgaacgccacgcgcgtcgatcttgtcgcggcagatcgtcagtgctccgacagcccgctcgagggcggcatcgctgatggtgtaatcccgctgcccgattttccaggacttgagcagcgggattacaccggccggtatcgagtactacctgccgctgttctttgacgaaacctccaccctgttcgattacctgccccaggacacccaggtgttctcgctgccgggcatcgagcaggccgcagaaaacttctggaacgacgtgcgtaatcgttatgaagaacgccgcgtcgacccctcccgtcctctattgccgcccgccgagctgttcctgccggtggaagactgcttcgcccgcctgaaaagctggccgcgcgtggtcgccagccagcaggacgtggaagccggcagtggccgtgagcgcttccccgcgcaaacgctgcctaacttggcgattgaagccaaggccaaccagccactggaagcgctctccaacttcctcggtgacttccccggccccctctccccaccctcccccgcaagggtaggggaatcgcatatggcgatggaggggtgttgccaagcggttggaactggattctttgggtgtctctcgcttcccgagggagaccagaatgcgccaactcaagcgcctgcttcgaccactcaaggacccccgcgccagcaacgtgcggcacgatctggtggagatcatcgtcatcgccttggcggcgacactggccggcgccaagacctgcaccgagttcgagttcttcggcaaaggccgagaggagctgttgcagcggttcctggagctcagatccggcatccccagccacgatacgttcagcaacgtcttccgtgctctggacccgaaggggttggaagcgattttgcgcaagctcagcaagggcttcggcatcaagggcgtggtcagcatcgacggcaaggggatcgtgtgctgctcaatgaaaaacacccggaagacggcgtgctactcaaggacaacatgaaaggtgatcgccgcgtcaaagtgcacctgggcgaaggctggcatgtgccgcgtgccttgctgccggtgccggagaagcgcgcgctgatgttgatcgacccgccgttcgagaagctcgacgagatgcagcgctgcgccgcgtccctcaaagaggctgtgagccgcatgcgtcagacggtcgccgccatctggtacccggtgaaggaccagcgcatgttgcgccgcttctaccaggacttggccggcaccggcgcgccgaagctgctgcgggtggaattgctggtgcatacgctggacacgccgaacacattgaccggctcgggcctggcgattgccaacccgccatggggcctggaagaggaattgcgtgagctgctggtgatgatcgccctgttcgcggtgatgttctgggctatctggtctgatttgattaccgtcttcgcttatctcgacagtatcaccctctggcagtacagcgggaccgaagctggcgctgcggtgatgaagagcgtcaccatgggtagcctgctgtttgcggtggtgtcgtcgatggtggcctgggcgctaattcgaaacctgccgggcctgctggaagtgctggtgctgtcgcgcctgaacctgcgtcagggggcctcctatgccattgccgccatcctcaactacgtcattattattgtcggggcgatgacggtctttggctcgctcggcgtgtcgtgggataaactgcagtggctggcggcagccctctctgtgggtctcggttttggcctgcaggagattttcggtaacttcgtttccggcctgatcagcctgaagcgcctgcaatacacgcgacttctggagcggagtgagcttcgcgaagatcgtccgctcctcgaccaaaacgcgaagcgcggtgtcgtccaatttttctatgtcgcgcccgagtacggcttggcccggttcaagtcctacttcacggcagatcttggcactcacgaccgcattgtcgcccgtaagaaccttgaccttgacgccatgctccgcgagcgcagcgattgctggtccagccgtctcctttggcgggtcgagaaaagtaaggaacccctgaatcgtgagatcggcttcgtccgcgatggcataatgcgtcttggcctcggacgccacaaaccctcgggtggcgacgaccagcacacggaatccgtcctcgttgtacgcccgagccatcgcagccagattcttgcgctcaacgtcaccaaggcgtgggcgccttccccggtggtctggcggtggaagagtgcgctcgagacgccgaaggcggcgaagactccggcggagacatcggcgatggattcgcccactcgggtgggggagccctcggggaatccggtggatgacatgaggccactgagcgcctggatgacggtgtcatacgcgggccgtttggcctgggtgccggtctgcccgaaaccggagatcgaggcgtagacgatgtcgggtttgattgccttgaggtcgttgtacgacaggccaagcttggcagcgaccccgggtcggaagttctcgacgatgacatcgcaggtgcggatgaagtcaagcagctgcgcatgctgctcaggatccttgagatcggcctcgatggagcgtttgccccggttgagcgacgtgaaatacgtcgagcccgtgtcggtgaagagtcactacctatagcgaactcctctgggctcgatcgctcatgggcatcagcgaggctttttacatcccggccgccctcgctctgatcgcggacttccatgcaggccacacgcgttctcgggccgtcggattgcaccagatggccatctactgcggtgtgatcctaggcggcttcggaggctacgtggccgacgaaccagcactcggttggcgttctgccttcattgtctgcggcattttcggcatgatttacgctgttccgctggtactgttgctccgcgatgtttcgcgtttcgaaacgactgttgtctcgaaaccatcgcccatacgggccgtgagcgaactgctcacgaactgctcgttcatcctgctcgttctctatttcacgctcccggccctcgcgggttgggtggttcgtgattggatgccggccgactggcgagacagaaagattctagctcctcttaccaccgttggaaatccaccttttcgtcgtctttgtggctctctgggtgctgatacgttttactccgaaatggcgatgtgttatccacttatgcaaggtcatcaacctgagtgggctcttgttcgtgggctaaactatgagcgtgaaatgatgcgaggtggtcgtcgtggtatattaggggtccaactagctaccggaaaactttggcaggccactaaaactgcacaagtaatagctgaacaatgtgatggcgttgattttctcgatttaaattgcggttgccctatagatttggtatttcgtcaaggcgccggttcttctcttctcgagaatcctggcaggttacttcgtaatctccaaggtatggatgcggtatctggccaaattcctgtcaccgtaaaaccaacctcgccgcccgttcgagtgtgcaattttgaccgctggggataacctcttcggacgcctgctgggtcgcaccagcgccatgcccgctgatacggccgtggcgaacctcactggcctgcaactacaactggatcatctgggccgggtcgtgactgtcaacggtaccctgcgctcgcaacttgcctcgcacctggcgggtgacgctcggccattattgcgtgagttgttgtgcgccagcagcgccctgagcgtcgaagggtcacccgccgactggcagcgccaaggcctggacctggactttcgtggcgctgctgatcaggtgctgcacacccgtggctgggtcgagcccgacggcgaccactggaccctgcgcctggtggatgtcagcgacctgctggcgggtcggcaattggcggggcaccgcgagcggaccatatgtatattcacacagccatatgcatgttcacatgaccatgtgcatcttacatgccaccatatgcacattcacatgtgaccacatgcatgttaatatacgaccatatgtgtgctcaggtgaccacatgcatattcacacatgaccacatgtatgttcacacacttaatgattcacagctttataagacctgagacagatgtgcgttttgggagatccagcttcacggtatgggctcatcttgtccacacatggagactaggcctgaactatctgtgagaaagttgcctgccagtttagagcagggcttgggaaaccttttccataaaaagccagttaggaaatgtttgaagctttgcaggccatgtgatctctgttgcaaccactcaactcactaaagcaaccatggacaatacatacatgaagggttcagcgcaacgccgaacagggtgccgttcgcaacatcatgcaaggcacggctcatgcttttctcctggcagtggcggagcagtgactgcttcgcgaaatattcgttaacctattaacgttataattaatatgttaacgatcgtcaagcgtggcaatatattccgacagtggttaggcgctgaaaaccggcgcaggatgaaaacccttgcacggccaacaccccaataagaaagagtgtccagcgatgatcgatcgtcagccgatccccaacatcaacatcggtcaggtctacgaccagcgctacagcgatgccgaagtgcactacgacaaactcggcaatctggcggaattcttcggtcgcaacatgccggtgcatcgacatgaccggttcttccaggtgcactacgtgaaaaacggcgcggtgcgggtctgcagtgacaggatcacgtgcaactgccggcgccagcgcccaaaactcaggcccaattcttccagcaacaggcgggtcatgctgcgctcgctcatgccgatgcgcaccgcccattggctgagggtggctttatccgtcgggtcggccagcaggctgtcggccaggcgccgcagcctggcgtcttgcggcatgggcaagtgcaacgcttcgatgggcgcagcggccagttcatccagcagcgtgttgatcaggcgaccttgtgcgccatgctcttcatacagcagcgggaagctcaccgctttgctgatcagctcatgcagcagtcccgacacggccagggtgcagcattgcgggggcagggcgctggcggcgtcgggatcgatcagcaggcaatacacctccgcctccccggagccgcgcgccgcatgggccgtcatctccgagagccccaattccagctccagcgcttcatggttgcgcagccgtcgaatcaactccggcagcacgccgtacaacgtcgatggcgcgaagccgatgcccaaccaggtcttctcgccctggccgatgcgccgcgtgttgtcgcagaccttgcccagttgttccagcagcacattggcgtgctcatagaaaaaccgcccggcctcggtcagccgcagcggtcggccgcgttccagcaaaatcacccccaattcatcttccaattgctggatctgccggctcaacggcggctgggcgatgtgcaggcgttcggcggcgcgggtgaagttgagggtttcacccagcacctggaaatagcgcagatgacgcagttccatcacggctcctttcataccttgaaggtattgtgcgagacccattctatatgtacctccaggtcaacctccgcacggtttaccggctgattaaggccggaaaaatccctgcggtccgggtgggccgccagtggcgcttccgcaaacgcgacatcgacgcctggttggacacgcagcgtccccgcggtggcgagcgctcgccccaggcgattgtttcggaccgaccccaggtccgcgacggtcgttcgcgcgtcctggtggtcgatgacgagtcgagcatccgggaactgctgtccaaaaccctggcccttgctgaatatgacgtcgacacggcgcccgatggccgggcggcgctcgaacgcttgcgcctgggcaattacgacctgctcattgccgacctcaagatgcccggcatggacggtcttacgctgatccgcgaggccaagcgcttgaaggccgatatcccggtgatcatcatcacgggagcgaatagcccgcggtcgccgcagtgacgatagcggaggtgagaaagaagccgagcacgaactttgggaaccgccgccagatctcgcgcgcgtcaggtccgttgccggagggttgcgcctcccaccgcgcggtcgagacgatggcgagtgcgaccgcccagatgccgatccacacgtcgcgcccgacgaccttcaccagcgtgaatgcctgcaccgcctgatcggccgtccccacgatccccggcaccttgccggcgagcccaccataggcctgcgcggcggcgataccggccgcgtccgcgaattcggacgtgccgatccaggcgccggcaaccccggtcggaagtcccagcgcgcgggcggccaacggcaacaggaagatcatcgcgatcgcccacagcacgaccgtggagatggtgaccgccgtatccagtccaaacagtgctctacctccggtattctcaatcacgaggctagccctaaagctatttcggagagaaccagctatctccaggttcgattggaatttctccgctacccacacctcatccccgcacttttcaacgtgcgtgggttcgggcctccagtgagtgttacctcaccttcaccctggacatgggtagatcacctggtttcgggtctacgaccacgtactaattcgccctattcagactcgctttcgctgcggctccgtcttctcaacttaacctcgcacgtaatcgtaactcgccggttcattctacaaaaggcacgctatcacccattaacgggctctaactacttgtaggcacacggtttcaggatctatttcactccccttccggggtgcttttcacctttccctcacggtactggttcactattcattgaaatgttcatacgcattcaagagccagagtattatgacaggataatgttgctcattggagcaaaatttgcggagatagtcaaggtaggtgagactatcgaagatgggcttaaaaccggaaagatttctcgcgttgccgcatcaactgaatcttcaggattgttgaaaaagaagagagaagaagtatcttctatttcctgtgcatctgatggaaaaggacacttcaaaaaatcctcaacttccaaaggttatcctcgagcttttcaaaattcatatccagcttgttatacccaatcaggttatcaaactccaccaccgagttaccaaactctacctcctaattaccaaactccaccatcgagttaccaaattccacctcttgtttaccaaattccacttccacattaccagaacactcatccatatgcactgcgtgaggtgcaatgttcgttcaataccgagaaagtgcgcagggcgcaaatcggtttcgacgacctgctcaatcgccttgaccaggccttgcaaggcccgtcgggcccgcgtctggccgagaccattcgcaagcagtatccggtcgccctgatcgatgaattccaggacaccgacccggttcagtacaggatcttcgaaaccatttaccgcattcccgacaacctggatgactgcggcgtgttcatgattggcgacccgaaacaggcgatctattcctttcgcggtgcggatatttacacctacctccaggcgcgaaaagccacggctggccgtcactacacactggggaccaactatcgttccaccaaggcgatggtcgaggcggccaaccattgcttccgctacgccgaagcccagcctcggggttcatgaagtggcgcacaagctggatacccgcaacggcgatcgcgccagcggcgtcccgcggatcccgcttcgcgaggtcgcgggctgggagcacgacctgcacgcggcgatggataacatccaggatgaaatagacctggtgggcgaaagcgcggctagcattgacgcctatgcggcaaccgacccggctgagtgctttgcggtgctctccgagtacttcttcagcgcgcccgagctcttcgcgccccgtttcccggccctctggcaacgtttctgccagttttatcagcaggatccgctacagcgcctgcggcagaatgaggcgtccggcgggcattcgtcccgccaggtccattaagctttttcagcaggggtacgctcggttgaccatacccctatgctcagggctaaaaacagcaatgccattcccggtgaacactgttggctcatcactgtctctttttcctctggttttgattctgaagcagggaagcttggaaagatgggccgctgagagtctggaatgcctttgtctgctttattgtggttgtttgtttgtttgtttattttttgtgatggagtctcactctgtcgcccaggctgcaatgcagtggcatgatctcagctcactgcaccctttgcctcccaggttcaagggactttactgtttcagcctccagagcatctgggattacaggcatccaccaccacgcccagctaatttttctttttttattagagatggggtttcaccatgttggccaggctggtctcgaactcctgacctcaggtgatccgcctgccttggcctcccaaagtgctgggattacaggcatgagccactgcacccagcctaattgacagagcattagtgctggctgagttaccacatatcagccttcacggtttacgtcgtagttttggtactttggccgagtgggttgaagttcccactggtattgttgctcaaattatgggacacaaacccagcgctcttgccgaaaaacactatcgccgtcgtccgttagatctgttacgaaaatggcacgagaaaattgagacatggatcttaaatgaagcaggtattaccataaaaaacaacgttgatatgcgttgattccattaaaaatcaacatattacaaaatatcatcaactattgatcaagatagattttcatgtatcgtaatacacagtttagtcaatgatacagcaactacacaggagataagccaatggcaaccccagcaactgtatccatagaacccactctggcagctatcagagctcgcgtaccagtcgagtccattcgattccagtccattagtttcgagtccattgcattcgagtgcattccattccgtggctgtccattccattccgtttgatgccattccatacgattccattcaattcgagaccgttctattcctgtccattccttgtgactcgattccatttcactctactccattccattccattcaattccatttgactctatatccgttccattcaattccattccattcgattccagtcttttcgagaaccttccattaaactcccttccatgccaatgcattccattccagtctcttcagttcgattccattccattcgtttcgattccattccattccagcccattccatgccattccattcctttcctttccgtttcattagattccattgcattcgattccattcagttcaattcaaggtgcggttgcgcacgatattcaaatcatcgtcttgggtggtggtcatcttggccttctaggctggggtaatgttcttggcggatttggcttttggctgcgtggcggcgacagataccggcttcgattctgccacggcggacggctgcgccttcgcttgcgctttggcggcgcggtcgaagacgtccagcatctgctgcaggctcgcttcctcgtccggcgttggcgcgtcgggcaccagcagcacctgctgcagccattcggccagcgcgcggatggattccggatcggcacgcgacagcaaggtcggcaaggcggcgacggcggcgtcgaaatcatgcatcatgaggcgcgcctgctggcgcacgatgtggcggaattcttccatgctgaagtcctgccggtactgcggcttgatcagcttgagcgcctgatttcaagcgtcgtgctgaagtagatatgcttacctatgctgatgtattgaaagagtttaagcatgctaagctgactgctgcacaaatcgcacaaatcgtaccagtcattaagcgtcgtgagtattccatttcttcttctcaaaagaagcacaatgacagtgttcatttgctggttgtcgtggttggttggaaggatggtatgggacgtgatcgctatggccaatgctcgcactatctttccaatttgaaggtgggcgaacctctttgcgttgctgtcaagacttctgtcatgaagttgcccacgtcccccttgaagccaattgtcatggcaggtttgggaactggtttagcaccattccgtgcctttttgcaattcaaagaatggcaacgtatgcagggaatcgaatctggtgacatcttgttatgcataatatgccagttagcatgaatgaagaaggaatttgcaatggcctggttaccgtgtacgcaaaatacgtactcgaaggtaaagaaaagcgcttttttgaattgcttgatcagatagtcagaatggaagcagactcagcaatagagtctgaggtaaatcagtttgtctatgatgtcgttctcactttattcccgcatcaatttaataaaaaactaagtcaggctaattccatgtgtgccttgactataaacaataaacccttggtttcttcttttgattttgcaattgcaactcaagataaaaattgggaggaaatctttaaaaatcttgctctgcaagaggatgagattgctcgtgttagcggaacagcgcatgccgtagccgtcaggagaaaaaataataaatacattgtatacgatcctaattacgcatggaggacgacctggagatcgtcggcacgtgcgggcgaggtgacgaggtgattggcctggtgcaggatactgacgctgacgtgtgtttgctcgacatcgagatgcctggtctcgacgggatcacggtcgctgccgagctgagggagcaggcgccgtggtgtcgaattctcatcgtgacgaccttcgggcgaccgggatatctgcgacgagccatggatgccggtgtggctggattccttgttaaagacacccctgccgaggatctggcccaggtggtgcgcaaggttcacgccggaggtagggccatcgacccggccttggccgctgaatccctcatcgagggtcacaatcccttgtcagaccgggaacgggagatcctgcggctggccgagtcgggagcatcgatctccctcatcgcttccgagcttgctcgagatggttgtcgcacattactaaaggttgtcaaaatttacaacaaatgtttgaacaagttgacttgtcaaacacacgggatatcgtcttgaaaagaattcttctgtaatgtttagagtacctctgtttggaattctttctccccttgtttagaatcagttgcaagcactttgacagcaaccgtctcaccagtagacatctgagctttataaacaggaccataggccccttgaccaattaatgtggtgaagttgtaggttgctctctgcaaatccctgcccatgagtagtaaatgatcatcatctcaattaagaatcaaaagcattacagcatgtagtcatgcactcatggccctaagatgcaaggtctatttattgaagactgcaatttatgttaaatagtatgaacggaattgcaatacattaaatgttgcttcccacacttggcacaaattgatctttcaacagaagaaccacttccattctctccttgatatttagagttagacaccctatcatagttgaccataggggaatcttggttgtagaacctctttttgaaccttggttgactttgttcatcgggcctaactctttttgcctccttattcattttcttaagtttcatctcctcaatttgttgagtatataccatgagccttgaaatatccatgtcatgatggagaattgtcgtacgacattcttcttcaaccaaaccggacaccccatcacaaacttattcattctagccctcgaatttgcccctaaggttggagcatatttggatatatagttgggtgaacttaagagaatactccttcacactcataccccctagacaaaggttcatgaaaagtaatgatgcgttatcaatactttgatgtgttaaacgtaataagtcatttcttttaacttgaccaccgatagctaatacagggtcaccttcagaagttgcagttaataaaccagtagttaagttacttacccctgggccacttgtagtaatagccacacctggttttcctgttaaacgaccaataccttgtgcaatcatcgctgcgttttgttcatgacgcgtaacgactaattcaatatcgtcatcctctagtgcattaaataagtagtcgattttcgcacctggaataccaaatacatactcaactccattattttttaaagtatcaattaccatttgtgctgcagaatattgtttttccgccatttatattcatttcctttcaaaaattaagttcactcaaaacatcttcgtcattctcataagcacgaccataaccagcccggtgcaaaggatattgccgaccggctgatggcctcgctcggctcggcgctgctgtactggtatcatttcgcgaccaacggcaagcgcatcgacgtcgagaccgacgaagattccatcggcgcgcatttcctgcatctgctgcacggcaggaagccgtcggcctcgcatgagcgcgcgatgcacacctcgctcattctttatgccgagcatgagtttaacgcctcgacgttcaccgcgcgcaccatcgccggtaccgggtccgacatctattcggcgatcaccggcgcgatcggtgcgctgcgcggcccgaagcacggcggcgccaatgaagtggcgttcgagatccagcagcgttatcgcgacgcggacgaggcggaagccgatatccgcaagcgcgtggaagccaaggagggccttcaccggcatgtacctggcgagcggcaatggcatgcagctgatgctgggcgacggcgggccgggacgctatctgctggtggtcggctacaagaccacgcaggccaatggcgccaattaccagggcgtcgccaccttccgctgttcctgatgacgcctgacggcacctgctgcgcggcgcgatgtgcggccgcccgcaatgctgctgccggtcgccgtggggacaacgaggacggctcaaaataagaaagcggcgccgtgcactgcacggacgccgctttttttacgccggcggaaattaacgcagggcggcgatcatctgtttcagcttgccggaatcgacgcagaaggcgcggatgccttcggccagtttttccgtcgccatcgcgtcttcattcatcatgaagcggaaggcttcctcgttccgtgatggctgattgtgatttggatgaaaccgttgattcatgcgtgtcgggggctttctgggcggccggacaaaactgcatcggtacccaacggatcctcatcgaggcctcactctatgaagccttcaaaacgcgctttgttgaacagacctctaagttgatcgtcggtaaccctgcagatgagcagacggacgtagggccgatgattaccgaggcgtcagccaagcgtaccgaggaagtggtcaatgacgccattgccaaaggcgccacgttgttgtttggcaacacatgtaacggctcactctattcacctaccgtgctggaaggcgtcgaccgccaatgcaagttgtggtgcgaagaggtgttcagtccggtagtcatacttcagagcgtcgcctccctggatgaagcattggcgctggctaacgtctctttacttattgcagggtcgctgctcattggacccccaattcaggagataaaactgtgcttcagtatgatgatgtgatgaagttggactttggaacccatattgacggtaatattatagaattcctcatctgtgtaactatgttagacattaaggtgcttttggtatgtgattttatggtatattggtattagtctcattatctctttatgtatcaaattgtttgttttttggtttggaaattggtacagtagctccggtcatgttatatccggtgcttcgtagtggagtacgaaaagaaccacattctcatagaagtgattggcatctacattaacaacaacataaccggtgtaatcccacaagttaggtctcgggattgtagtgtgtatgcagacctttcccctaccttgggaggtagagaggaagccgaaaagcgaacaccccgttgtacgaatcctcattgggatggttgccggcggaccacaagaagaagccctcgatgagcttcaggcgtcggtggatggtctaccgcgaccagaggcagaccctgcgatagcgagagagcgcaagtcccaactgctcgagcagctgcgagttcaactcatgcggggcttaccgacgtcggcagatcgtgtcacgctcggctcgctgcgcacgctgctggcggagggatcaatcgagatcaaggtcttcactcgccggtcgcttcatgggaagacatacgtcttccaccgcgtcgatgtcacgaaccccattactggctatgtgggatcctcgaacctcactgcaccaggacttactcacaatctggaactcaacgtagatgtcgtcgacggtgcgggcgctaaagagtcatagataccgcgcgagatgctttccacgtggccctttaacgtctcgccgctcatcaattgcatatcggctttgtcgcccacctttacatgcggcagtttggtttcttcgaagaagccgtagacccagaacgagttcatatccaccacggccatcttggcctcaccaatgcgcgcatagtcgccgcgatgcacattgaggttggtgacgtaaccgtccaccgccgccagcacttgggtgcgtttgaggttcagctcggccgcttccagttgcgccagtgcgtgctggtaatcggccaacgccgagtcggcgatgttgctggcgtcgtcacggttttccttggaaatcaccaacgcatcgagatccgctcggcggtgggcgttgaccttgcgcatttcccacgtggctttgcgcgatgccaccagggattgaagatacaacgacatttttttgctgctgcattgttgatacatcttccatcgtgtttgaaatcgacactttcatattttctaatgtatcggaaagctgttgaattgcattatctacagtattaactgctaatttctgatcttcgctaatctcatttgtctgcttcataacatgaacaagttgctgagtatcctctaaaatgcttagaatgatttgctgaatattagttgttgccgcttttgaactttccgctaagcttcttacttcatctgctacaaccgcaaatcctttcccatgctcacctgctcgagcagcttcaattgaagcattaagtgcaagtaaatttgtttgttcagtaatttgggcaattacatctgttactttcgaaatggatttcgtttttccatctaactgtccggttacgaccgcatagggtgcccgaatcctcccttgcagaagccccatcatgccgaaaaagacctccaaaacactctcccgcgcgcccgcaaaagctgctccgcgcaagacgaccaaggccgggccgacacccgcgacaaaacgcgcggccacacccgctaacggcgttgaagagagaatcgcgcgagccttggagacaatcgcggccgggcttccagccgctaccgaacggccctcgacatccggcgacctgaaggccgcggacgcttttgtttggcagccaaacggccgtctcattccggtgcctcgcgtcagccgcgtcgatctcggccttctgaagggcgtcgaccgcatgcgtgatattctgatcgaaaataccgaacgctttgccaccggcctgcctgccaacaacgcgctgttgtggggcgcgcgcggcactgctgggcatgacgatcgtcaacaggttcggcacccgccgcatcacgcttgtcggcttcgtgatccaggcagtggcactagccctgctggccatcgtcggcatcccgaccggtgccctcgtactcgtttccgtggcgatgctcgcggccttcgtcttcgcacaggctggtgggcccggagccaacctgatgaactacgccaccctgtcctacccgacgaggctgcgcggaatcggcatcggcttcaaccaatccgtgctgcgtgcgttctcgatcgtctccctcatcatgttcccgatcctggccggctctatgggcaccggggtcttctggatcgtcgcctgcgcaccgctggccggagccatcgcggtcggcatcgtcaaatgggatccaacggccaaggacgtggaagaagaggcctgagttcagatggaatcaactcaatagaattaggtttttttatgactgctgaagtgaccgaacgaaatgttggattgattcaataccgaatcccagatctccatagacgactaatggtaggggctgcatttttaggaaagaaagatagtggcaaaaggatgttaatcaagaaccgacgtctcatgccgaccccgtctgcagttgctactacactgttacatccggataaagtgacccgtactggtggaataattgcaatgcgactataccgcctgctgataaagggaagacagtataccaagcttgtcccagcagccaggtttggtcctccgggcagcaacccggccggtatacaccccacagaggaaattgggctgtgaggtgagtaactatattcaacaatcatttgccaacatcgttcctaagccctactaatgcaggacgcatccggcgctgggcagccgggaacggactacatttcccagcacaaagcggtttgtgagaaggtcgccggccaggtgcgtcaggttttcgggaatatgccgcagtgggacttggcctactgctcgaggtcggggcgtcccaacgacccgtggcttgaaccggacattatcgatcacctccgcaatcttcccgagcagggcgtgcagtctgttgtcgtcgctccaattggcttcgttgctgaccacatggaggtcgttaatgaccttgattacgaggccgccgaggcagccaaggtgtccgggctcgccttcacgcgggcggcgaccgctggcacccatcccgcctttatcgctgatctcgccgggctcatcttgtcccaggccgcggcggctcgtggtgagggtggcaatctaacgtccgggagattgtggattcctcgtcgaggtccaaggggagtttcggcgcggtcagaaataggtgtaatgtgagcagactgggtaacgggaacggttgaaggcattggcagtctccttgcatacaaagtggttcgactggccaccaggctattcgggtcttgcaactgggataatttcgagttgaactcgaacaccctctcgccaagccacgattttcaggggatcgccaatgtgttcttcgcagagtatctgtttcaggtcggtgacgtcctccagtggttgatcatccactgttaccagaatatcacctacgtgaagccccacaacggaagcgggtgctccttcttccaaaccggagatcacaaccgctgaacgctggtcgggaaactcatcctgaagggcttcgggcaaatcggttcgcttgacgggcaagacggttttttcgccatcgatgaccagggtgtggccagcgttgtggccaccttggtagcgcactacggcagcggcatgttcggtcagcagatcaacgatcttgcctttgccctcatcaccccattgggtgcccaggactacgacattcttacccataacacttgtcctcattcgcgcaaacttggtgccggcgatggccggcaggaaaactcaagaagccagtggcgatacttgccaaagcccgttctgcagaatcaattgctggtcgcagtccgcttcacgggcggcggccaatggctgtccaggcaaggcctggacgacacgctgaccctcactgcgcaactggcaaacctgctgccagagtgctgcgtccgtactgtcgggcatccagatgccaccagacggcagctcgacctcagcacgatatgcatcattaatgtgaagattaaaaagaaaaatattggcgttaaacctttgattaggaaccataattgaatttttgctaatctcataaagaataaggtaagtgcaaacatccaaagatatgttaatggtgaatgacagaaaaatattaatataataaaaagaaaaacaaacattaactttgctcttggatcaagatgatgaacaaaagaattaattggtaaatatcgccctataatcaatttatttttcatgttgccactccttatacaagcttacaaatgcttcttcagttaaggcaatatcttttaattttgtttgatgtttttgttcaaagtcatattgtaactgaacaatttcaggcaaaccaatatgccaatccgccaatttttctttatctttgaagagctcttttggtgatgtttgccacctggtcatacgtcaaggtgcgactggaacccgctgcggactcttccagcagcgcaaccgttttcctgaatgccaaccaggcaggcgaaccgatgtgcagcgtagccggcgtgtcacgcaccagaaattccggggcaacattggccagcatgatatgcgcagtggcttgcacggcctccggccttacgcctttattgcgcaccaaatggtcctccagcgcctctcggacctgcgccaaggtacgccctgcattggcggtagcgtagaggtcgaagcctgcgatgtggttccgtcgcaaacccagctcggggtcgatgtgcagcatgcgagcagtgagcagtaattggttgcactgtacttttgtaagtcccgcctcactacggcctattgacgcgagcaacatctgctgtcggaagcgattgagcttactgcgcagggagccgaacttcaccgctcccgcgctgacttcctatactatcgggaccaaagtagtcgtgcaaaaaaagctcggcgactggctggaagttcggtcgatcgacagcaacgagacgggttacatccgaaaagaatttgttacgccgtcggagtgatttgcccaagggcctgtcgtttacctgccgcttacctcaagcgatgacgacctgcgcgtttggtagcgcgatcgagacgtgatcgatccatacatcatcgaggcgttaaagtctcggtttatagccgtatcgactcatctaaatcagctgtttcaaagccttcgaaagaatttctacattttctgctcgcgcgccgtggcccatcaatccgacgcgccagacttttcctttgagcggcccgaggccggcaccgatttcgatgctcagcagcgtccacgatgtcggcaacgtcgtcctgcaacagcaggtccatcggatcactgtaggccgccgtctcgtcaacgaggacgccgtcacgcaggaagacgacccgatcggcccatccagcgtgtcgggcctcgtgggtgacgaggaggacggcgaccccggaatcggccagatctcggatgagggacatgacctcgtcaccggaggtcgagtccaatgcgccagtgggctcgtcggccaggagcatgcgacgatcccccaccacggcacgggctatcgcaatgcgctggcgctcgcctcccgacatgtcatcgacgaaacgatcggccagctgcgccatggagaattgttcgagcacggacatggcagcctcacgtgcccgagagccgggaaccccgtcgagttcgagaggcagacagagataagcggtgatggaagtgtctgatggcagtgctttttgcgtatataaaggaaaagtacataaaggagagggaaaatgaaacgggttgcggttatcggtcagtcaggggatattcccgacgaggtgcgacgtattgcagaggaagtgggagcagaaattgccaagcacaatgctgttttattaacaggcggcggaagcggtgtcatggaggcggcatcgaaaggagcgaaagaagcaggcgggcttgtcgtcggcattttagcgggcgaccgtgttgatgtcgctaacgattatatcgacattcccattacaacaggcctttattttgatttccgcagcttgatccttgttcattccgccgatgcgctcattatgattcgcggcggaaacgggacgctgggcgagttatcggcggcatatatgaacttcgtgccttcggcggtgaacagttcgggcagaccgtaggtccaggtgccctggtgctccgagccgtagaacttctcccaggcggcggcactgatgaggcggtggtcggctgcgaggtcgacgatgagcgtctcggggctcgtctcttcgagctcggcggcgatcgtccccgactgaccgtgagggagtgcgaggatgacgacatcgtggccggcgagcacctcggcggtggactccttgaccacgaagtcggaatatcgggcaagatggggttgatgtcggccgagcgtctcgcccacggaagaatgtccgcacaccgtggtgacgttgagatgagggtgagtgctcagcagccggaggacctctcccccggcgtatccggtagcaccggagacggcaaccgtaagatcattcatatgtataaccttgaacgcagcgaccgcagtgccttcaccggcatcgccctgggccgaatcaaagacaaacgcccggacggcagcttggtgatggatgagcatttctatcccaccagcctgtccctgcaagcagtgccgacattgcaccgctacctgggtgaagtggccggattgatgcgcgcgcgcgcccagaacctggcccagcgtattggctcgccggggcagtcgggcgtggccgatgtcactgacttcaacttgctgcaaaccctcaatcgcctgttcccgttgttccagcacctggcccgccagcgccaggttcacccggagcggctgtacaccgcactggcccaggcctgcggtgaactggtgacctttaccgatgaaggtcacctgccccaggagtacccggcctaccaacacgacaacctgcgcgaggggaaatacttggtgatcggccacagcgcggagaacgtcagcccagcttcctcctcggcttcgcggtgcgcaacctcctccggctcttcatccctgtcgatcaggccggcaaccatttcgatcaaccaagggttgtcggtgcgacccatggcgccaacgcgaaactgctcgttcaataccacttcgtcgcgttgcgggtcgtagggcaatacgcacacagcatcatgacgaacaaagacttcgcggttgatcacgcggctcatgccaccatcgaatttctcgtggcgcaattgcaggcggtcgagctgatagaagcccttgaaggcattgtcgcgctgaacgatttcaatctttctcggcgtcgattttgcgaaatccgtcatgtcccttcctcgttgtgcctgcgcatttggcgccatcctaacgggcgggaagcgcggcgtagccggtctcgctcatgcgccccacgacgccgccggtcgcggtgtcgacgatcggcagcccggccgggtccggatcggcccagagcgcgaggaacggctcgtagtcgcgacgctccccgatgccggccatggcgaggtagagcggcactcggacggcgttgtaggagaagtgcggcgggaagccggaagccggctggggctggccgcctcgcatcgagatccactcggtggggagcttcgcctcgccgaagcgcgcccgcaggacgagatcccggccggccgccgcgaggcggtcccagtcgaattccggcgccacggcggcgagacgggggaaggcgggaaacacccagtacgagagattgacgaccggcccatccggccggtcttccgccgagaacccgctcatcgcgtgcgtgacagcaataccggtgcgtttcgcctgtatgagcgttatggcttcaatgaaattggccgtcgccgtgactactacccagcggtgggtggtcgcgaagatgcggtcgtcatggcctgcacgctagtcgattgaacacacagcgcaatgtgaacgccgatccctgtgggagccgggcttgcccgcgatgacggtgtgtcattcaccaccgccatcgcaggcaagccagctcccacaggggcaatttcacaatgcgttgtgtggtgtgtcagcggttgccatctaacgggtcaatatcggccaattccgcctcatccaacccattcccgccgccaatctcatcctcatcaacaatgctgagatcataatccgccggattatcttcgccttcttcccgcgcatcgcgcgcgccgtcttcatggaattgtattcattaatgacatattgatctatttggggaatgaagacgaccatgctagtcatctcagaatagtcctccaaactctcaaagatcgagaattgtatgccaaaatttctaagtgtgagtttacacttgaatgtgtggcattcttaggccacattgtatccaaagaagggattcgagtggacactcaaaagaatgaaggagtacagaagtggcccagaaccacatctccaactgatataaggagtttctagtggttagttggttactacaaatggttcatcgaggggttttcatccatttcatccccgctgtctaagttgacttagaaaatagttacatttcaatggtctgaagcttgtgagaaaagctttcaagaattgaaaactcaattgactactactctagtgttgaccctactagagccaccacccatcatcccacctcctcctcctccgcctccagatgaagccgggatggaggacgaccccgccacgctcccggcgacggcgggtttagacttgtccaccgtcacggcctttttcagggatttaccctctgtgcaacgcaatgacaaacaagggttaggatgtcatcgttcgatcgcggttcgattcgacagagtgttgattgttccatcagctagggggaagttgatagtgcgtatccgagactcacgttggatctgttgtaacaatgccgactgcatgatggagtgcctgcttctcgtgtgactctatcgtgtatgcgacgactatagagatgcgagagactgcaagttgcaagttgaaataggtgaacaagtcgattgaccatatcatattcattcgtttgacccgactgcgtacgtcacatggaggaattgctacttatgatcaagatattttcattaatgtagtgggcggtgtaaaggtaaccgaaacaggctccgatttggcattattagctgctgtggtatccagtttacgcaatcggatctttgaccgggaaaccattatttttggcgaagtgggtcttgctggtgaaatcagaccggtacaaagtgggcaagaacgattaaaagaagcagcaaaacatgggtttaagcgtgctatagtgccttttgccaatgcccccaagcaatctaattcttcaatggttatcgaacctgttaaatatttgcatgaagttctggaaaaaatgtaatctttgattgtagcccgggtgaagcggagcggaatccgggaatgaaatattaccgatcccgggttccgctccgcttcacccaggctacaaggtatcaccattcaccatgttgaaacacaagatcaggcagcagacatgcttaccaagccattgaaggacatcaaacacaagcacaactgtcaactcatccatctagagtgatggagtgagcagggatcacaagacattctggaagtcgaaaagttactccatccttttcaggatgcggctcacttcagaatgagaacaacaactcaggaatggttcaataagaaaagacaaaaacatacaaagtctcaggtcaaagaagaagggctttgagcttgagcttgagagggagtgttgcaaatagacatgccatgattggctcatggatgcaggaagcaatctcaaccacaaagtaaacagaggaagcaaacaggaagcaaacaggaggcaaacccatggaacatgctagaagatctatttttgccactgaggcttagaggctacggaggtcgccggccccgtaggcggtgcatatatgacattcgccgcattattgataggcccttggccggttgctaggatgctagacacatactcctctacagagcttttggttgcagcatcctgctcatcaatagggtctttgacgttgctaatacgccgattgacggcattaaaaaagtcaaggccgaaaggtcttacgagtgcacgggtaaaggttgtgagtccttgttggataagcatggttagccgatcaaaaacatcctcatgaatttccgcaagaaacttaccttgatttctaatacttgtaagttggtaggcctccatttcccgagccactaccagctgtcccggtcccgccagagctgttgtggtaacgacactcccaccatcatcgcttccgactccatttacactttaatggttttcttattgtagaagctactttttagtggatcaacttatttctgacattgctgatgtgaggcatcagatgtctgtaattccttatgatatagtttctcttgccatttttagtttctcatacatacatgtttttgtacttaactctcgtctttagcattctttataaatttactgattcctttttctgtttccaataggtactgcctgtaatgattgatgttggaactgacaatgagaatctcttgaaagaccctttatgtgagtacttattctttatcatggttgatgttaattcacatatagttctccaatgatcaaatcaatacaaaccaactactacattatgttctctttaggttctggaatatgtccctgtttatgcatctttgtttacctgaatgaataggtatatatgtacggcctcaacacttctccgagccgtccggtgagaaaattggctgcaaaaccaatgaccgttgtgcgaaaagcctggcgaaaccgtgcaggaccgagcggtctcaagagaatcagccagcgctgcgccctcaagacgtaggtggcgaggacgacgaggagcgctgctgacagaaaccacggatcagcatgaatcatcgcgcgccaggtttcgtctaagtcgatgttgcgcacgaacagccacaaaagaccggccgtcagccccacgatcacgagcgtttgccagggaaatcgggagcgagtttgtggtgtggacatgactcgggtcggtcagttcgtactataagattctcggcaaatcgatgggaaaacgagagttactcctcatcgtcgccttcgcggccgtgattgccgtggtgtatcaggcgtaagcctccctcatgtccaccaccaaaactttgcggttgcagacgaattcgtggtttatgccggacataaagcgcacctacaccttttgggccataatttttatgtgccgatagcgccattaaatccacagaaagatgttcaaggtcaatagaaatttttccagcactttgtgccgcatcaacatgaaaaagaattcctttatgacgtaataaagtgccaatagacccaatgtcttgcactacaccgatttcattgttcacatgcatgatggatactaaaatggtatctggtctcaatgcttgagccagtttctcaagatcaagcaaaccattggattcaggctctatataggttacttcgaatccatctttttctaaacggtcaaaactatcgagcactgccttgtgttctgtactcatcgtccacgcggtggccgtcgacgcggctgaacgacgaaacaacgaatcctgccgcatcgctgtgcgcacgccagcccatatcagcaaggtaaacagcaggatgacacccagggtacccagcaggcccatttcctcaccaagaacggcaaagacgaagtcgttctgagcgccatcataaaggccgccccatttctgtcgggaggcaccgataccaacaccccaccagccaccggtcgccagcgcataaatcgccgaaagaggctgctgggaggtgctggcgccattgtctgggtgcaggaacgacaacacgcgctcggcgcgatagggggtgatggcagtgagcagcagcaccgccaagagaccgaggccaatgagggcacccaaataacgcttgggcactccaaagttccacatctgggccaacatgtttacaatcttttccctttcatggtcctacccatttttactaatatggaacggttcgatttcaggttaattgaggcagctaaagatttaggggcaaacaagtggtctatatttacacgagtatttttgcctaacacagcccctggagtcttatcaggttgtttgctggtcttgttaccagcaatgactttattttacattcctaatgtattaggtggcgctcgttccattttattgggaaatttaatccaaaatcaattccttgtcctgagcgattggcctcagggagccgccaccagtgtgctattaacttccgttctgcttattttaatgttcatttttcggcgacagaacaatgaggtcattcgatgaaaacaatgacacagcgcctgtttctttctttagtttatgcttttctttatatatccaggcgggcgtcgtgcatgtcaatacctacggcggcgccgacaacagcgtgccgttgggtggcgtcaagcaatcgggcaatggccatgacaaatcgctgcacgcgctcgacaaatatgtcgacctgaaaaccgcctggatccagctctgacacgatagggcgctttcgcttttgttccattgaaacgcgacaatgccccatccttgcctctccaagcgttccgggcggaaagccgctgcgtgcttctcttggaagcgctccaatccccggtaaaagcccggtgcgaaaacgcgccggtcgagccgtctcgcgaacaaatctttcgcgagcgatcgatatgtcgtgcctgaaatttgggccttgctcgcgctggtggtacacgcggcaatatatttaacgtgtgaactatattgacaaatgcatctatgcatatcttgaaccaattccttcttctcatcttctacatgagccacactacccatggacaatctacttagggcatccgcaactatattagtttttccggggtggtaaaggacactcatgtcataatccttcaaaagttctaaccaacttctttgtcgaagattcaagtctttttgactaaacacatattaaagactcttttggttggtaaacaaatatccatagaccccatataagtagtctccatattttgaaagcaaacacaaccgccactaattcaagatcatgagttggataattcttttcatgtaccttgagttgcctcgaagcataggcaatcactttaccccgttgcataaggacacatcccaaacccactcgagaagtgtcacaatataccataaattacccattagtaccttgaatccataattcaattcaagaaagttagtttccaagtcaagtgaagttagtttccaattcaagtgaagttagtttccaagtcaagtgaagtcaagcttagaagtaagtaagtcaaagcaagtctttaaggtttttccaagagtcttcattgaacgttttaacttcattctaaggctcaagttccaagttaagtattgagtttcaagtaaagtcaaaagttaagagtttcacatcaagccaatagttcaagtaaagtaaagagtttaaagttgagtttttttctcaaagttattagggaactatgtattcccaaagaagttttaaagaaatgtttttacatttaaacaaggttggaaactaagatttccaaaagagccttcgggttagtttttgagtaattatctcatatcagcaggaagatttctgaatatataaaattaattcatcctcaaaaccttcgtgcggatgaaaaccaaatgtgccaaaacttaatccatcaataagcaaaataaggtttttaaacctgtcaggaatcaccgcttcacttcttaaagaaaataaaccaatagtcttatttccattcaggtattcaatattaatattcatacgttaatccgatttatccttctcaggggcgcgtttgtaacgccgtttacctgaatcccagacaaacgccgtccgcttcccgtcatcagtgccatcccctacatcgtcggcaatggcaagatcctcattggtttctcgatccaactggaggacgttttttagcgctccaccggtcgagataaaacggcgcttgtgaagctgccgcgtcagctcaagaaaccactcaggatcgtttgccgttaccgacgaggtcatgggcgctatcagcgatctcaccgggcaaaaatacgtcgatgtctacggtttccgggctaagcatggcaacctcaaagacaaagacgtctcgaaatttgtgaaaccgagacccggcggcaaccccataccaccgcctcgcgtgacgaaggcctaatgtcatgaatgtgttgcgtcgctcccatggtgaggtgacgggtcagcctctgcctgctcaaccgaccatcgtcgctgtccatctgcatcggcgcggagatcttgctacagctgaacactgcctatcaggactcgccagcaaggtgttcgtcatgtccggtcgtcggaggaagagaacccaggcccactctgaagctttacaccacttatctcaaggcgctgtcgttctcatggccccagaaggggtatgcaggtttaaagtattggcatcttgagtagcattaaagtacaacttcataaggccgctatctaaaaccgcaacaatatgagtccacttatttaaaggaactgtggtcgctgaatagagagtgtagccgctttggccagtaagctgaaatagtattttgccgttagagtttattatataacgatagccgtaactataaccgtggtggcggacaatacctccataaccggaagagggatatcccaaaggatagacccaagcagaaatggtaatagcagaaccgctgatatcggttgtggttgaataaggtgcatagacatagtttccgctagtcgttgcttgaccgttgaaaagcaaacaattactagttttacaaacagcgctccctgcccattgaggaatggttgctgccagctctcctttggaaagtctttagcttctgattttggttcatttcttacattgtctgaattggaaaattaatttttcatctctgatcttagtgctttgattcttgtattaagtttcatctagctttccttttaattcatgattatcttttgcaggttgtgtcacctgtcaagatgactcttgaaatgtgagaattgcctactttaactgcttttactttgaaacttgtcattgttctcatatctcgatttattatcgaatttgcagatatgcaacgtgcgttattccaatcagtgctttctttgctgcaagtctttggtgagctctctactttgaggagctagaatacttgttggcttttcttacggattctgtctttcatgatcacttgtgacttgttggtatttattcgagattcctattagacacacactgttatatgacgtgctgcggatcagaaatgttcattgtcgctactcggttcacagggagtgcaccagctccaccagccgtgtcaagacgttggggtcggtgttggagggcacgccgtgacccagattgacgacgtgtccaggggcctgacgtcctgccgtgacgatatcgcgggtggcggtttccagcggttcccatccggcgaagagcaaggcgggatcgatgttgccctgaaccggcatctccatcccggagaccataagagtggcgcaggcctcatcgaggctaatccggtggtcgacaccaagtactgggtaccgtgacgcagtagctgccacctgcgcaaactcagacagcagatgggtggcattgacgccaaagtgaaccatcgggatgttcggatcgacggtagccagagcccgctgagagaacacctgagcatctacaccctgatcgatgtgccgcatatcaaccaggtgcacatcttctaccgcgccgagttggtcgacctggacttcgcggccggcccagaaagcctggaagtgcagttgttcgatgaagccgacgtcccttggtccgagctggctttccgcacggtcgggcgtaccttagaatgcttttttgccgaccgtcggcaacaagtgtttccggtgcgcagcgaagccgtgtccctcatgggcaagcccacccaataaaaacccggcacaaagggataccgttttaatgcgttggttgcttgctcttatctgcctgtcgttcgctaccctgtcttgcgcctccacagtcgaaaccatcggcggcaagccgatcgagaaaatcctggtgctcaagtccgcacgtcagttgcaactgatcgttttagagcttttgaagctggtatttctggtatggtgctaattgtagtactcgcatttgcgttccagacatttttagctcaacctaattggggtgaagtaacactcggaatgctgacaccacatttcgatggagtcgattccctattacttgcaacaggtattttaggagctactgttatgccgcatgcaatctatttacattcttccttaacgcaaaatcgcgttattggtcgtaatgacaatgaaaagcgacgtattttccgtttcgagtttatcgatattgtaattgcaatgattattgctggggcgattaatatgagcatgctgattattgcagcagcggtgttccatacgcaaggattagtagttgaggatttagacattgcctataatggattacgagatgcacttggccctatgggagtacaccctctgcttgcgcacgatcacatcacccgacgacaccgtcccggacccgagatccataccctcgacctcgaaacccgcctcgaccagatgctgagacactgcctcccgtttgcccgggatcgccgccggatcgatgctcaccatccgggacagaccgaccgtccacccgtcgccgcacccgactcccgacggcagcatcccgtacgtccccacctcccagggcccgtcgtggaccgccgcaagcactccgttcgtcgtctcccggaaatccagatacaggctctccgcccgctcgaacaggtcctcacctgtcggttctgccaccgtcgccccacatcccgtcagaacggtgaccgcgaacgcggccgccgtcgcaccgaacagacttctccgcatgctcaccgccgctccttacactttttcgggatcaaaatataagtactgtgacataggccttccagcaatgacgtctgcttccagctattacggcgcatatgtagaaaaagtacgtggtcatctattttacagcgagttcgacaattgtgaatgtaatctgcacaccagaatcaaagagaacaataacgaatatatgataggaatcatagtcgacagaaagattataaacaataacagagtaagtgttggagaggccgcccatcagttacacagacaaaacaatctggagaaattgtgtatgaggtcttcgaacaatcgtgaggtaaacataatgttcaaagtccttgaaggcaaagtatgtattttggacgtcccaactatcatagacggattcaaaagaacactaggagaaatgaaccagttttggggagactctggaagcattaccggaaggtggagaaacaggacattcccgcgagtcagacggcatttgaaaaacagtggcagcagtggggggcatccggccttgcagctctcagagtccagttgcttaaacgtgaagaggaattgcgccggaaggagcaggaggatacagaacgtagtcgcgcggagcgacgagcggaacagctcaggaaaaatgacaatgccgttatggattcaggggtactgagcgcagtcgttacggggtatggcgaggcccccatgcctggtaacggggaaatgacctgttaccttctgcttcacaaccggaacggagaatatacgctctgggggaacgagctggagaaataccgcaccagaatctttgagcgtgctgatttaatgcgtgacaggagtggttatatctgtgaccgaagcgacatgtggaaccagtccgggcagacccagagcccgttcgtaacggtgatgcagaccatcggcattcccggtgccaccggggtgatgaatttcgtgattctgatcgcggcgctgtcggcgatgaacagccagctctacatcaccacgcgcatgatgttcagcctgtctcgcgcaggctttgcgcccaggtccatgggcgccttgagcaagagcgggattccgttgaacgccttgctgctgtccagttcgggcattgccctggcgacgctgctgaacgtggtgtacccggaaagttcgttcaccttgatgatggcgatctcaatgtttggcgcgatcttcacctggttcatgatcttcctcacgcacttttttttccgccgctatcgcaagcgtcacggcggcgcacagctgtcgttccaactgcgccgcatccgccgcccccaggccgaataccgagccgccggcgaagaccagcgcgtggagttggccgaccatgttttcgggttccaacgcagcggtttcacgcccgccggggccgccgccacggatgtcgatactggcggtccagaaaccatcggggcggatcaccgtgacgccggtgtcgacgtgcaggtccgtggcgtggccgaccgtgaggcctgggatatcggtgagggcgttgcgcgggccgggtctaggcatacagaaaaagcttccttgggtttaggtatggcgtggggtgagcaaggggtgtgccaagcgtagctcgcccggcctcacggctcgaaacccgacaccccggaaaaagccctgcacaaaaaccaacaccctgctctgcgccctgttagaaaaacaccaacactggtatgcgatgagcacaaaggcacctacagcgatcagttgatgatcgacacccgcttcgatttgcagaagctgctcggctggcaaggcgcgagttttcgcatgaccttcagcaaccgtaacggtgaaagcctgacgaacgaggcgggcacccacaccttgttggcgtcccaggagatctatggctacggcagcgttacccggctggtgcagttctattaccaacaggcactgctcgacgatcgatgggtggtaaaactgggccgattaccgatgagcggggatgtctttccgttctcgtgcaagttccagaacctgacgttttgcggcacggtgcccgggtacatcacacccaactggttcacctggccggtgagccaatggggcgcggcggtgtcaggcaaactcacggatgagttgaccgtcaacgctgcttctgctgccagctgctcaatccgaccaaaggtaatgttcacggcttcttgatgggcttgaagcaagcgctcatcctgacccaccagggctaaaatggatacggacttaggcgctgataaagtcacatcggttccaggacgatgttgacgtactcccttatcgataatacccagcagttgcccgctgggtaattgtccatccaataattgcaaaaattgcgaaggctcaatttcaccggacaattgtaacttttgcgcaccgcgcccgatccatcgggacagactgttaagcgaatctcgatcgcttaaataataattatcttgattggtgtaataatgcagcgcgtctttagccgcacttattttatttaaggtcaacataatacctccctggatgacttaaaaaatttcttttataacttgatggctggaccgtcgcagacgttgcttgcaccgttgagtcgcgtgcaagtgagttctttcaaacgcagtgcaccgttttgcgaagagtgcgaacgctgcaggaatggccagtgcgagatcgcctgatctttttactttaaaaggacgttatgtcgatgctgcaacctttgattgctggtgaacagatctttgctgtgctgggcgccgccagtgacgctaagccattggaggcttggcaggcgatggcggccggcgcgccgctgcatcctctgtgggcgggcacggcttacgcggcgtgggatgaggtgatgccctatgtgggcatcgtcgaaccgggaagccccttcctggattgggcgctgtccacgcaagcgttggattggggttggctggccgtctcttcctgcccgctggaaaccccacctcccccatcccacatcctcctccatctcgtcgtcgtcttcgatcgacctagccaaaccccgcgctctcaacggcctattcaaccagcccggccaggggcaacataccgataacgatatccccccgatctccaaccctacgggtctaggaggcggtgatctccacccccccaagatccccggtggagggcctggaggtccggatttacgtgcgcctagaccgacggggacgatcggcggtagtggagcgggtgggagtgcaccaccacctcaaggaccttcgtcggagaacttgccgggggaaggggaagcgccggcgcctgaaggggcgaacgccgagcaacaaggacgcgatacgcagagtttgaaagatcgtcggaaaaagctcagcgagagcatgtccggggcggcggggaacgacctataatgtcttgcattcttaaggcaacttctatccattttctcactttgcacataaaagaaggcataaatttcacacctttaagataattatggaaaaataatgggctcaaggtgataaaaattgaccaagttatgatcatttgaagtcacacatggaaaattggggattcatctggaggacttgtaatctttcttcatcatttaagtctcttcctcatgacaactccttgaaacttttgaagtgatttgttgataaccatttgaagagaaagatttattttgaatcactcaaaaataccaagatatgagcagatatattcctttgaaattcaaaaccctagctccttagatcaagagaatgctttgaggaactttgacaattttgaacaaacttcttgtaccaacacacatgatttggacaacaagtctgtctttgtatttgtcaatagtttcatcaactttcttttccttttgtagatccactttgaatccaaaagtttatttcctcgaggaagatcaaccaactctcaagtatagttgctcaagattgaatctatcttactattgacaaacttttctcaaagagaatgagtccacaaaggacataacttttagaatatatgagactcattttcaagaagaaatgttacaaaatcaaactcgtaggaagtaatttgtccattgacatttactacgcctccgaatctctttattaagtacattctcctttggatctttccaaggtcgtttagactcttcacttgactatccgacagttcgaacttatgaaccataaatcaacatgctttactatttgtagcatatccaatgaacatacctataacactataacatagaccaattaaatgaaacgaaaaaaaaaagagatgatagagaatccgttgagaagtttacctgtatccaaggtatctattcttactacaatactttgttttaactgtatcgcactatgtatcatttgataaccctcaaaatcttccatctttggttcaaatcgaatttcaaatggaagaaatccacagatatttacagccagatagctcgcaacaacacaacttcctatatccacttatctttcaggagtatatttatgcacttgctcaggatcatggtttaaatagaaataggtcgattttgttggaaaattcaggttataacaataaattgagtttcctaattgtgaaacggttaattactcgaatgtatcaacagaatcattttattatttcgactaatgaatgatggggcgctcgacttctcggcacatttcctcgacgacctgctgggtaaaagcgtcgtggtcagtggaggtcccgatgaggatcgtcgggtgaattcgtcggatcgtctcggtaagaccaatgtgtcgattcgtgtgagcccaatgacgagctttctcaactggcttagcgtagggctcttggtagtcgggtaggcccttcatatcgtcagtgaccaggccattgcggtcgacgagccaaatccgatcgactgcctcctgctggcttaacccgtcactgatcatggctgcgcggatttggtcagcaattccggtgccagcggtacctgccccgtatacgatcaggcgctgatcagcgaaggattgccgggtcaccttaagcccggagatgacggctgccaacacgatggctgctgtgcgcaatatcgcgggtgtgggacacaatggtgtcgatttcttccggatgagcaaagaccatcatatgccagtgcacggtgccgtcatggtgaggctccgccgtgcggatgccataccagcgcaggccgtcgcggttcagttttttgcggaccgtcgcaaaaaacgtgttaaccaggtaatcgctggagtcgcgcattgtggccccgttccatttgggattcggatgaccgttctccgttgtggcgtggtattttgacgggcaggtgacagtcagaaacaccgctttgtcgccacgggcttcggccagaagttccagccccttcatggtggccatcatttctgccttacggtgaaccgggttacttactcccgcgtaatacaccgtctcgagatcaatcgtgaacccgtcttcattttccagcatcgtgtgatcaaccgcaacaaccgcctgaagcgtctgcttgatcttggtgcacctgagatcatcgtgaataacgaaaagcgcatgatgcaggaagctgttgactcattgttcgacaacggccgtcgtggccgtccggtcaccggtccaggtaaccgtccactgaagtccctgagcgacatgctcaagggtaagcagggtcgtttccgtcagaaccttctgggtaagcgcgttgactactcgggccgttcggttatcgttgttggtccacagctgaagctgcaccagtgtggtctgcctaagcagatggctctggagcttttcaagcctttcgtgatgaagcgcctggttgacctcaaccacgcacagaacatcaagtcggctaagcgtatggtcgagcgttaccgtccacaggtttgggaggggcggcgcctgctcgtgcgggcgggccgggtgccggtggtcgcccccgcggagttcaccgacgcgatcgccgtgatcagcgagaagcaggcccgccgccgcgcgaaagccgccgccaaggccgcgaagaagagtccgctcaccgcgggacagaagcgcgtcgcatacatcggcgccgtcggagcgttcgctctgtgcggcctcgccgtgctgggcggcatcgtcctcatcgtcgcgggacggtaggaggcccgtcctaggctggccgtatgacctcccgcgaaccctccgacgcccgcgtgcaattcggtcgccgagcggctcggcgccccggtcgtgtgggtggccggcaaccacgatgagcgcccggcgatgcgcgcgggactgatggatgccgcggcgccgggcgctcatcgtggcccagatgatggccgcctggtcgccgcgctcggcgaggtgacggtccaggcagttgtaggaaacgttcagggtgccatcggcgaaccacttgatatcgacatggtgatcatcgaacgaggtctgcttcaccgtggtgaaaggcttgatccagtcaaggcgcttggcttgctcgcgccagaagccatcggggttgaccaccgactgctggtacatggccttgtaggtcgcctcgtcggtcagcgtgttggctgctacttcggggcgaacggggtacagggaagccgcactcatctttcttacctcggtgacatagttgtttttgtatggccctgttgtagccggggctgacctatagaaccattcgacgatggtagtaacaagcccctacaaattgccctgatatccccgtttgcacctctgggcatatcgttctcctatcgggtgctgtgattggtgcggtgcgccttgccacacccggagaacaaggcgcaccggattggggaggctagacgcctgcggtgaagccggtaacagccttgtggaggaccgcaccggtgccaccgaagtagtgacgcaccggggtgccgatctcgtcgtccgtgaagacgtcgagggtgtactgctgtgccagcgcaccttcctgtccccacgtgttctcgccggaggtgcccagcttgacgatgccgtagccgcggcccatgatccactcttcggtggcagggccatccgaaccgaggacgatgaggcggtactcctggccgatgggcagctcgggctcatcaacgacgacctcgccggtggttggcgactgggttacagccgacaggtcggtaccgtacgctgatggtcgaccgcgcatcattcccggaatcagccgaacctcgccgtcctcgacgcgattcgcgatcggagagatgatctatcacgcggggcacggtcgcccgtgggagcagagcccactgcctgtctcagtcgcgctgcccgattgttcccagccgctgcagtcgctggtggcgcagttgctggacgagtcgtgcgccgattccggtctcaatgacaccctcgacgaggtgagcgcggcactgcgtcgaaccgggaccgccagtgccctcccgctccttcccgccgaacgcgacctcgaccccggacaggccctgacggcacgattgcgagcagccaaggcacccacagtcgtgcgtcctcctgaaactgcggcgactgagttgccgcgcgagtccacgggtaccgcaggtcggctgtcatagtaatgtccattaacacccgttccttcaaataatgatggatacctgtgtgattcaggaacgtgttccttgtcgattctgacgttcctacctaaatctttggtaaccaaaaactttccggtttgaagctcggtgtctgttatagtagagcgatgcagtctagcataaccaattcgcttgacacctcgataaaatatatactgacaccaacgatcatagtcagcaggttcaatgtctaacattcccgtgtctcgcgttagaatagtttggggttcttggccaacgtttgaaacaacatatccgagaaacactagaggccttggactctcgcgcataattcgagccaactcagtgctctgaagacgtcgatccaactgactttcatattgaccattgtgagaaaccacaacatctattgggtttgaagttgccatagaaaaagatgccggccttgctgcaggtttcaaagatcaaaattacgaagaagtcggtgtttctattcatgataaaaaaagtatcctgagaaaagctaatcttcttttttgtattaatgaacctgatcccaaagatctagaaggcttatcccagggcgccctggtcataggccacatagataatgatccagaaagtaaactcatcacttggtgcaaagaaaaacaaattacactgctctcaatgaaccttataccccgcatcagccgtgctcaaagcatggatagcctatcttcacaggcaaacttggcgggttatagggctgttctagaggcatgctctcaattccaacgagccattccgatgatgatgacggcagcaggaatgattcagccagctaaggtgcggccttcaccgtgcccctcttcatccttgagatggcagtccacattcccgctgtggggcttcatggcatcatctcgccccaaacctctctgtggatccagttcctgctggccacccctgtggtgctgtgggcgggctggccgctgctcgagcgcggctggcaatctttcgtgacccgccgcctgaacatgttctcgttgattgctctcggagtcggtgccgcctacctgttcagcttggtagccaccttcctgcccggcgtctttccgaccgggttccgggacgcggagggattggtggcggtctattacgaggccgcagccgtcatcaccgtgctggtcctgctcggacaggtcttagagcttcgggcgcgcgagcgaactggcggtgccatcaaggccctgttgaacctggcacccaccgttgtcgccctcgacgcgcagatcggcgcgcacggtcacgcgaccgcgctcatcgagaggaaggtctgaatcgacgaggatcgggttggccttgacgccagccgaccacacgatggtgtcggcgtcgaattcttcgccgctggagagcttgacgtgcttgtcggtgcagtcctggaggaaggtctcgaggtacacatcgattccgcgttcgcgcatgtgctccacgacccagcgagcctgagcttcgccgacctcgggcatcacgcggtcgagtgcttcgacgagaacgaagcggacatcggcttcggtcagcgtctcgtactgagccactgccgagcggacgacgtcttcgagttcggtgaggagttcgatgccggcgaatccgccaccgacgaagacgaaggtcagtgccttacgaatctttagctaacgaggctagtcaggacagcatctgccttatgtgctttgagagagaccataaagtttgtcataggcagatattgtgcgaacaaatattgagtttagctccgataccggttaggcatttaggtgttcccaaggattatgcattaaaggctgcctgattgtccattgaactgccttctagaagccgagttgttattctagttaaagcagctcctcgcgttggcgcgaagcacggtgaaaccgtatgctgtgccgggatcgatgaaaacggtcattgggtgcgtctctatcccgtaatttttcgcaccttggacgatgcgaagaagttcagccgttgggatatcgttgaatatgattggaagctaccaaagggagacaatcgatcagaaagtcgccgcgttgagcatgcgtcaaccaggggatcgatgtgttagggccgttaccagcagatacgatgtttataacaaaccatatcaatcactgtgatgcttatgtggcaatgtaccatgatcaaggactgccagtcttaaagtatgctggatttaatgaagcagtaaatataactctcggattgccgataattcgtacttctgtagatcatggaacagcattagaattagctggtaagaacaaagctaaccctgggagtatgcttgctgcggttaagatggcgaaagatatggctttaacaaggataaaatgaaatgtctctgattagcctgatagcagccatagatgaaacaggaggattgggtattaacaaccaattactctgctatttgccagccgacttgcagcactttaaatcgattaccatgggtaagcctattatgtgcgtcatcactgatattcgttggatttatgcgacgtgggtcactagcgtgaagtgcagatcaactcaacgatgaaggaatccaccatgatcaaacttctttcccacctgtcctccgtctccatcgcagcccccgatgtcgaggcctcggtcaagttctacgaaacacaggtcggaatgactgtcgtcgatcggatcgacggtcgtgtgtatctgcgctgctggggcgactactaccgctacagcctggtgatcgtgcccggcgccgaacccgcattggagtcgatgacctggcgcacctcctccgccgaagccctgagcgaagccgccgaccgcatcgccgcggccggagtcgacgtcgaatggttcgacggccacacgaccggtcgctcactgcgtttcaccggaccgtggggacacaagcggaatccattgacccgaattcaatcgttattgtcgaagcggctctgatgattgaatccggcagttatcgtcgttttgaccgcctgatcgtggtctggtgcagacctgaaatacaaatcgagagattgcagactcgcgatggattatcaaaggaggaggctctcaagcgtatttctgctcaattgtctcaggaggagaaaaaacggtttgccgattttctgattgatacttccgagggctttgaatctacaagaaaacagtgcgaaaatgtttacgcggaattaaaaatgctgctaaggtaattacccccaagtatttctcccatctttagcagaccgcatttacctgcaatgccccgacgtcatttcgtaacagccataaagcgtttattgcccgcttttgcggcaataactcttgactctaaacactaatgaatataacatgttaaacagataacaaaagcagaagtttgagtgggtgaaaaatttgaggttgactcattctgttactgacaagaaaaaaggcttagaaaggggcagagtgggaaagccttagtaactaggacctcaatgctggctgttggcagagcaggggcagattgcccctctccagagtccccttcagatgctggttctcccatgctggggctgcttttctgctcaaacatttatggcccatgtttagaaaattacacaaaaattaaggagaataaggtgttagaccagtgtgctatttgcagagggaatcttttttggaggcttgtttttagagggactctttcttcaggataagagagaaatgaatattttgtctaatactttcctaaatacctagggcctatatgagatattctcttgctcctctgttgttttagttagtctttattcccataattgatgcgattcgcgtaaatgagactataaacaaatgacctacccttcaacaaatttacaatgcttgacaacgaaatttccggaagtttatttacaaatactttgattaaaacatcatatcccttgcgatcttgcatgcgaaacgttcgcaaaaaatgtgaatcccctagactaaatttcgtaacgttagaattgctgggagaataagaattctttgacttaccttctttcattgtgatattctggaagctcttcctcgaacaattcatggaattggggggtctggatagtggaaagctgaatccccataggtcctaaatgttgcttgcacagggcatcacttaaatgtaaaaaggctaaggcaccccccaccgacccacgaccctccctctcgttccctccgtagtaaactcaacgcccacctcaacaacaacaccgcctttcgggaagttactggcccacctctaactctccccggatggaccctgcataaacatacctccccggccgcctacccccgttccctaccctcgtgctacattggccctcctgacgagatccccgctcgttcagacccattcgggccggtcgtcggcgcgggtgcgagcgagggcgccagttcgagcgagggcaaggataagcgtaagaaggagggtaaagaggggagaaaggaggccatcttccgagcagggcaggaagcgttacgatgtcgcctagctgctggggaaggacggagggatgcgaaggatatcgtcggaccggggggttttacagggttggggggtccatcggctcgccgaaggcgaagccctgcgcgaattcgcagccaagctgatagagctcgaccgcgtccgaatccgtttccgcgccctcggcgacaacttccatgccgagatcatgcgccatcgacacgatggatttgagcaggatcggccgcgccccgttgcgggcggtgcgaacgaaggactgatcgatcttgatggtgtcgaacggaaatcgctggatgtaagcgagcgaggaatggccggtgccgaaatcgtcgagcgacaggccggtgccgagttccttgatccggtgcagcatctgcgcggcatgttccggattttccatcaccagcgattcggtcagttccagcttgagcgatccgcgtgccaccgcggtgcgtgacagcacgccgcgcacgtcgtgaatgaggtcgtggcggcgatgccgcgcgtcgcggcgatcagcgaggtcgtcgtgcacgcgatgccgttctgcgtgaacacccggttgtagtcggcggtgccggtgaggtgctcggtgaggtcggcgcgaatctcctccgcgagctcgctgcccgagatctcgcggccgcggaagcggtagacgtcgtcgccgtgacgggtggcccagtggaccagctcgtaggtgagctcgtcgtggttctgcatgccgtgcacgagctgcaccggcgcgacgccgagctcgagcgacgtggtcagcgccaggcgcaggaactcggtctgcccggtcgccagcgcgtggtggtagccggggcggccgacgaagtcgtacgacaggtcggcgcccacggctccggtgtcgcggatgtcttcgatggtgaggttgagctcctggaagtgacgagctggctcttcgccgcctacaacagcgtcgaaccgctgatgttcgaactgtcgaacatagagattttcgccgcaggcgaggaatgggcgcggctgcgccgtcccggcctgcttgaattccttcgcacccggctcggcaagcttgcggaggcgctgggcgaccggccgtatctcgcgggcgacttcagcgtcgccgatatcgcgatggcgacggtgctgcgcgaagggatagaggcgggcgtcgttgccgaacatccgcggctcgaaacctatctcgcgcgctgcctcgaccgccccgccttcggccgtgcgctcgcggcgcagctcgccgccttcaccgaggagccgagcgccgcatgacctgatccccctggaaagaaaaatggagagagacgatgacctatgtcgaaggctcagacgccagaaactcacgaattgaagagcgcaacaccgcgcggccgtcgcccatgcgcgagtaaggtgtcatcccggcgcccttgaggtgcaggtcccaatgctcgcctgcttcgttgtagacctcgcccagcaacaacccccggccatcacccagttgcggggtgtagccaccaaactgatgcccggaatagaccatcgcccgcggctccgcttccgcccacagcttgtgcccgccgaacaactcggcaaacaccggtgtttcggccacggccgggtcgaggtcgagcaacgccatggcggcatcgctggccactaccaggcgcggtgcgtcgaggggttcgggcaaaacgtgggttgagaatgcgcccaggcgtgcgaagcggttgtcgaaggtcagttcgtcgagggcttccacaaccagaaatcgtcatgcacgaagtggtacaaatcgccttcgggcgacagcagcagcgtcagcgcatccagcaggctggacttaccccaggcgttctcaccgatcaggacgttgttctgctccagatgcagtgacaggcggtttataccgcgaaacccgacaatatccacacgttcgagaagcatacatcccccgagaaatgaccactttttcctttaagttatcagcagtatagcgggaggatgccgtgcagaacactgccatacgtcccgattattctttgcaggcgcgaaaaaattaagaatttacgtggcaagtttcatttgaaatagtttcaacagcacaacaaactattgcccgcaaattggactatgctctattcacctccagtttgaacaaggatcgacatcacattgcctcaatatgggttccaacgaaaccaatttagtcattagtaaagccgaagtcaatgaaggtactactgtgaagaaattgaaacctcgagctcgaggacgtagttttccgataaaaagatcgacctgtcatataactattgtaatgaaagatatatctttagatgatgaatatggcgagatgtcttcgttaaaaaaaacgagatggaaaaaaaaatctacagctatgacgtatcgtgatatgtataatagcgggggattatgggacaaaaaataaatccacttggtttcagactgggtacaacccaaggtcatcattccctttggttttcacaacccaaaaattattctgagggtttacaagaagataaaaaaataagagattgtatcaagaattatgtccaaaagaatatgagaacgtcctccaacattccggctcagttcatggcgatgcgtgccctgcgtcaaattcgcgagttctgtcgcgtctgggatgacgaggatcttgccgaacgcgccacgaagctggccgatgagatcgatgccggggtgaggcagttcggcatcgtcgaggaccaccttgcctacgaggtggatgggcttggatcagtgctggaaatggacgacgcgaacatgccttccctgttgtctttgcctctcaccagtgacctcggtcgtgacgatccgctctaccagagcacccgccgctgggtgctcagcgcggctaacccgtacttattcagtggcccggtagcccggggaattggtagcccgcacagtccaaagggctatatctggcacattggtttggcggtgcaaggactcactggggacgatgcagaggatatcaacctgctcgacgtcgccggagaacacgatcttttccggcgagaccagatcgaagtgaaaggtgttggccatttcggttacgccgcttccgccgcgagtttcttgcccttttcgacggcttcctcgatggtgccgaccatgtagaacgctgcctctggcagatggtcgtacttgccttcgcaaaggcccttgaagcccttgatggtgtcggcgaggtcgacgaacttgcccggcgagccggtgaagatttcggccacgaagaacggctgcgacaggaagcgctcgatcttgcgggcgcgcgccaccgtcagcttgtcctcttcggacaattcgtccatgcccagaatggcgatgatgtcctgcaacgacttgtagcgctgcagcacctgctggacctgacgcgcggtctggtaggaatggtggcgcgtgagaagtacagtgcatacccttcagcgtcgagaaccactttcaccgcattcgggttaaacgcttcttccgcattgtggattggcaccgccagagtcgccatacccacctgacgctgagcgaggttatcagcaacctgacgaatgattgtcgcagggatcatcggttcatcaccctgcacattaacgatcaccgtgtcgtcgctgaatgcgcatttttcgacaacttccgccagacgttctgttcctgacggatgatcggcgcgcgtcatacttacttcaccgccagcggcttcaacggcgcgggcaacatcctcatgatcggttgccacgatgatgcgctcggcacctgattcacgcgcgcgttcaagaacatgaacaatcatgggtttgccgttaatatcaaccgccccactggtgcccgccttccacgaagcgttgtttggtgagcgcactggtaaccgtgccgtattgaatgtcggaggtttcagcaacctcagcctgatcgagacaggcaagcctgtcgccggcttcgactgcggcccgggcaacgtcctactggatgcgtggattcaccaacaacgcggcgaacactttgatcgcgatggccagtgggcagccagcggcaaggtcgagtcccaattgctcaacaccctgctcagcgaccccttcttcgtgaccaaaggccccaagagcactgggcgcgaagtgttcaacctggaatggctgcaccaacaccttggccgcttgcctgcatttgagcctcagaatgtacaggcaacgctgcttgagctgaccgccctgacgatcgttgagtccctacagggagttataggcctggcctctggataccgccctcctttctcctgctgaggaaccctgggccttcaccttgcccttggtggctcctgagaacaagaagatggatcttcatcttgggaggtgaggtatgcttactctctgaggaagtgagttgggttaagagggctgagagccaagtgttaaactctggcacccccatccttccaagggttgcaattcacaaaggactgaggagatgatatgacctcacctcctaggctggactgaagaggtgggccgggtgtcagaacaagcagtcttagaaaagcagtgagcaatagaaactgtccctcaatcccacagaaccttctcccttctctctcaagatcctgttcttccctcctcccttcaaggtctcaggatggctgatcctccctctgagggcctgagcgacccgatccccgtgatagggccgggggccacggcatccgctcccatccgcgtgacggcggaggacgggaacgtccccgcgaacacgccggtggtgatcggcagcaccgtggtctcggacgacagcaactacgacgagctggtcgtgccgtccgtcctcgttcggctgttctcgaccgatccgtcgctgcgcatcgagaagcgcgcgttcgtcgacgtggccgactcgtcctccccgcagcagatcatggcgacgggcaccgaggcgctcaccggcacccggctgaccgacgggcaggcggtctgcttcgtctacaccgtcacgaacgtgtcggccgatgactgggcgacgcagctgcgtgatctcgtcatcaccgacagcgacacccgcctcggcgaggacggtgtcataaaacaaacgacgcatatggactcctgtcagtcggccactattgtccgtgtggggcgtaggatttgtcgagaaatcctatcggctacctgattaaagtgtattcggacgctcggcggctctgtcggattcacaggcgtatggatactatgcgcgccatgcaaataccccttgatcacccgctgttgcaacgtattgtcgacgacctggctgaaaaaggctggtcgcggcaggacggcttcctgccccaggctctgaccctggaactggcggctgagtgccgtaaacgtgcagccgaaggtgaactggccccggcggcggtaggacgcggcccggcccaggagatccgcgaggggattcgtggtgatcatatccagtggctggaagagggcgatgcagcggtctgcgacacctatatggcttccagcaccgcacggctgacgatgttctccgacgcaatcagctcgatctcgtgctgctggcgaccgagttcacccttgatcgcggcggcgatttcaggatcggcctgcgcgagcgatgccgaaaagaaggcgtcaggggcagacgcagtgttggcggacgaattggcgggagcgctcattgtcggaatatctccgccgccgcggcccgtgggacggttgcggacggctctggatgctgggggcgaaacgatttggcggggataccatatatggcggcgggggccaagttctccggggccgcagacgctatttagagcagcatgccaaaaggccgaaacggcctcaaacgcacaaaagcgcaccgccccggttaccggagcgatgcgcgctgggaagtgctaacctgatcttaaaagttccaaggaaaatatagatctctctttaactgggagaaccattgcaaggaatctatcaagaagtacctatttagatgacttctaattagatattcagtggtcaactggatgcatctctaggaacttagtaacaccaacaatggtcagaatccttagaagtcagcatgtggcatatagaacacaacaaattcatagtcgtttgaaacctaataaaactaacacagatcaatgcaattgatgcacaaaagtcaatcataaatgataactaaaatgaatcccccaagatcaataaaaaggctattgaaacaaacattcttccgtgtgtagagtagattgagcatagaatcgcaagacgtagtatattttctttctttccttcttgtgttcacccaacatagaaaagcaaaaattcacctgcctaaaatactgtttaacatatcttatccgacctttcaggccagatcctcggaaggggaagttgattaatttgtgtgaaatacacattgaaagccgattcgaagaaagtgaaccggcattttcagtggctagtatagcgtaaggtactgtaaagccgccagagggttaaaattcagacagctgaaaaatgcaaaactgcctgatacgctatgccgatcaggcctacgcagtccttgcaatatattgaatttggacgattttgtaggcctggtaagtcgtttacgccgcatcaggcatagacaaagagcactttatcaacaaactacatttgtacccgtaacgctatgcttccggcggcagacagacgccaattccgccaattccacagtaaccatacgggtttttatgcagatattgctcttcgagtgcgaagacgcgcaacaatgtgcgcatcacgcattacacttcatatgtggtgcacatgatgacacgccgcaggttgcttctccttgggccctgagatgtgcagccaaatcgtgagaatagcaccggcatcaagccgcgtcctgggcaaatcgaagctgcaaataatcacaaccaagatatagtgtccaccgcatcttaagcacggaacgaaaaccaaggcatttcgctcccccactccatctcccaaccacaacaaggcgaccctcctttcggatgggtcgccttgcagtacaacgtggtgattagctcaccaatgcatcacttagccttctcgatgatctcgacgaggcgccagcgcttggtggcagacagcgggcgggtctccatgatccgcacgcgatcgcccatgccatacgatagccataacattccagtgggtgttccagcggataagcggttactttgcgcaggccatcatcgagaatttcgccagcgccaatttcgacaatttccagcggataatcggtccatgagccgctaatccgcagcgcggtttccacaaattcacggataccttgcggaccataaatcgttaagggttggataatgcctgacatagaacgactgcacagcaagccgggtaaaccaaaaagatgatcgccatgaaggtgactgataaaaatcttgtccagttttccagggttaaaggcggtatgcagtagctgatgctgggtgccttcaccgcagtcaaacaaccaaagtccgctctgggtcggatgttgcaggttaagcaatattgccgtgacattgcgcgtgcgggttggcacacgtctgcgggctgcccgcgtcgaagggcggcgccggtgcgtattcgatctgtagttgcacgcgttgcgcgacgtcctcgctgtacaactcggcggccagggtcagggcgaagtcgatcccggcggtgatgccaccaccggtaaacaggttgccgtcacgcaccacccgcgcctgcaccgcaatcgcgccgagcggggcgagcaggtcgtggtaagcccaatgcgtggtggccttgcggccgcgcagcaaacccgccgcgccgagtaccagcgaaccggtgcataccgatgttacgtagcgcgcggtctgtgcctggtccttgaggaaatccagggtgtgcgggtcctccatcaacgcgccgacaccggctccgccgggcacgcaaatcacatccaggcgcgggcaatcggcataggtcgtgtaacacaaaacccctctcgcaacacaaccctgtgttaaggtggtcatgatggctttcctgacttgcagcatcgagaaaccagatgaaaggtaagtgtttgtcgttttgtcctgccattaagaagcctgcgataagttgaaaataatttaaaacgcgatagtatagtcggggtaaggctaagaattaagaattaagaaaaaagaatttttggtgttaagggaaaggccattgcctagcgtatcccgccacattggccataatcccgccttcgtggggttatgaaggctgccatagagggaataaggccgccagagtggcctttatctaggacaaagaccaggcgcgacaatggcgtcttttcgttccaaagcccatggtttcgatagaatttcagtagatcagagttgtttaactttagtaaatagcgtgaatcattaataccggtaataacttttcgatcaatatcattaaggattgatcggtaattcttatttcctgaccataataaaactttagatttagtgcttgtacttcctctaagctttcaatatggtttaatcatgatttcactttttctataggtgtggtatatcgaggatgtaagtgatgtgatgttacaatgacttctgtaacaccttgtgttgtcgcttgtcttaaaagatccagcatctctgtttcatttgtcggaccgtcatcgatattcggcaatatatggttatgaatatcaatcatacctattcatctccataatagtgataataactagaagacttatctacttttgccttatttaaaatgacgcctagaatattactgcctgctttttccatacaccagctctgtcctgagaaggcctagaaatagcaaattacctttttgcagtgagcactggcattctgaggtatttagaattttttctcaaaggaaccaggttccttgcaaaaataactggttcttggttaaagatagggaatattttataaagcaaagaagttttctgagatcactggagttttgttgaaaagactcagagccaacttgaactagctcctagctcccattgggtaaaaatagggtattttgagtatcagaaaaggttataaagacttctgcttctggccaaaatggagtattaggaccaggatttaccttcctacctgaaggaaccaggaataaacagataaaatacatgaaaacagcagttcaagacactaggcattaggcagtggaagatagtgatctctaaaggtttagccgtccgcgtggttgacattgccgcagggcatgggcgctatgtactggatgcgctggcaaacgagcctgccgtaagcgatattttgttacgtgattacagcgagttaaatgttgcacaggggcaagagatgattgctcaacggggaatgtctgggcgggtgcgttttgaacagggcgatgcgtttaacccggaggaactcagcgcgttaactccgcggcctacgctggcgattgtctctggactgtatgagctgtttcccgaaaatgagcaggtaaaaaactcactcgcaggtcttgccaatgccatcgaaccgggtggcattctcatctacaccgggcagccgtggcacccacaactggagctgattgccggggtgttaaccagtcataaagatggtaaactgtgggtaaccaaagagttttttaggatcataaacacccttttgcttcagaacctcggcagcaatcggcactgtggagttgactggattgctgataatgtggataaaggcatctgggcagttgtcagcaacagcctcaaccaagcctttcacaatattagcattaatgttgaacaagtcgtctcgtgtcataccaggctttctcggaacgccagctggtatgacaactacgtctacacctttcaaagaattggccaactcagaagctcccgtaaagtcaaaaacctgagcgggagtgttgcaatggctgagatctgctgcgactcctttgacatttgcaatatcataaaggtgcaacgatgatactagcggcgacatcttaatcagaagagctagagactggcctataccgccagaggctccaagaacatcaagccgtcacgccgaatcgcgatggaccttataatcagcttatgaagaatgcaaagccctccgcggtcgccgtaaaagccgcccccgcaaaagaaagcgcgcgcgataaaacgcgagccgctgtgcacgagcatccgcatacccatgtggacgatcatgcacacggcgacgcgcatgaccacgggcatgctcacgccgcgtcaccggaagccgcgctggtgctggcagaggaatattgccgcgagcgcggcgagaaactcacgccgatccggcgcaaggtgctggaactgctgctgacctcgggacgcgccaccaaggcgtattcgctgctggacgacatgcgccagatccatccgggctcggcgccgcccacggtgtaccgggcgctcgatttcctgctgtccgcagggctcttctatcttgtaagaattccggttcgtcagaaaccgattcacctccgtggacaacagcagcagaattggcttctactttcacggacgagttggcttcttttgtgaataactctctctcaacatgctttgccttttctaaggcaatatcttgtttcacagcttcttgcgtaacaggaggaacctttggttcgctagttttaggaatgaagtcatacttaaactcccattcgttgatggacgtttgcagcggtaatctaaaggagtcaattgttgaagagtcacctttcgccatagaagataaagaggaattgaagtgtctaacggaaactcgcgatgaagcgacggaacgcctaataacaggattgatagtcttgaacatttgtgatggaaggaaagagcgatggaagtgttggcaaatcctcagcattatcctcagccttgccaactcgacaccaatgcaggatagacaatccgatgtcaaatgttaacactctgcgagtggtacattttccccggattatcgtcctgagcctgccgctggctctctttctaccgcctcgctttgctcgttgctcaacgcctcacagacacggattaaaatccgcatccgttcaccgttttttaaagtccgttaaaagcatgatgccatctccgagagttaatctcgtcaaatgctaaatcgtgggggtcccctttggggttccgatttagtgattgacgacaccaccgattaaaaaacttatgcggggtggatggtttcacgaagtgaggccatccacctgtaagacagggttttgcttttattccctgttttggtgatcgggtgtgtggaagtatgtattttgtgagatgagttgaatcattaattgacgagcgaaaaatgaaaaatttcatcctctaattctcgaagagaacaaaaagctgtgacaaagttgaattatacgaaggaagattagaggaaaaacggaaaagcgagaaattaaacaaaaaaaataagaaaacaatcactttatttataataatgggtttccacaaacggcatgcggacgacttgggctggatggagtttgttacgaactttaatgtgcgctggagtaccaacttggtgcaacccagtagaaatgtaacccatagctatattcttacccagagtaggagtaggacagccagaggttacttggccaacctccacaccatcaacttcgaccgcgcttccatgacgagcagggactttttcaacgatgaaaccgctcacaggggggttgcgggcggatccattggacccgcccgagccgatatgggaagtgacgcgccggtcagccacgctcgttctgcggaatgaacgtccgctgcgtcgcaccggtatagagctgacgcggacggccgatcttctgtcccggatcttcgatcatttccttccactgggcgatccagcccacggtgcgggcgacggcgaacagcacggtgaacatgctggtcgggaagcccatggccttcaggatgatgcccgagtagaaatcgacgttcgggtacagcttcttctcgatgaagtattcgtcctcgagggcgatacgctccagctccatcgcgatgtcgagcagcggatcgttcttgatgcccagatcagccagcacttcgtggcaggtctcgcgcatcacctgggcgaacatgagggaaacaactcatacaactcatctttcttcaaaaacacaagtttttatggaaatgcgcaaacctcattaattcacataaacatgggaggaactacctcctctactctttaggaaagtttccaccacataagaagctaacattccatttcataagaacacattcaagcatgttcatttaattcacatcatcaagtcaagtatgccatattacacacaatgcacaacttaggaaaaaaaaaaatctccatttaaaacacacatcatacaacatgagagaataggactacctctacgaactcaatatgcatgcaacttagacatattccatttcattggaggaatttcctcctccaactcaaatcatgcttatcatatgatcttaggccaattatgcaattacttcttagacctctgcttcctcgtgggtgagcagggatacctggcgcgttctgtcgataccggacaatcattcaagcaactcgaaagtccctatgaaggcagtttcttcactgctcaggtgcgcgatgacggcgcgttgttggtggcgggactgaaaggccacgcgtatctctccagtgatgacggtgacagctttcagcgtattgctgtttcgtcgcctgcttctttcagtagctccgtgcgattggccgacggcactttgttattggctaatcaggcagggggcattttcagtagcgcagcgtcacatggcgccgcgctgcaatctgtaggaaaacccttggggctgccagttagcagcctgctcgaggcggccgataaaagttttatcgctgccggttttgctggcttgtcgcgctttgctccatccaaactccccaagcattttcttgaacctgtagtagctacagatattaacctgctcaatcgaaaaatgatttcacgcgttttaagggcattccgtggacagagaacagctagagaagaaccagattcccgtttacttcgtcgcggtcattgtcgcggctatcgggggcctgctcgcacctgatgcctctcaagcgttagttgcgttggtgacaccagccatcgctgtgctgatgtacgccatgtttctgcagatcccattcttggatcttcgcaaagggcttgcaaacaagcgtttcatgaccgcgctgctgaccgccaatttcgtcgccatccccctgttggtttgggcgttgacgatgggcctagccgaccacccggcgattttggtgggcgcactattggtcttgctgaccgttaaaggtttcttcgtcgtcagcttctacagccagttccagcagaccagaaacatcttccagcccctgtttcatttgctcgagggtgtcgacaacggcttcgagggaggaacgctctttacccagcgcctgtgcgcgttcgggttcattccagacatccggctgttccagctcggcgtttacttcttccagacgctctttcttggcgtcgtagtcaaagataccccctaagaacgtcggagcgttccgtgaggtcctgaatacggttttttaccggattaatttcaaacatggtctgttttcttttatggacttgtcaaaatgcggtgataagagcgggattgtaccgaatccacgcccttttttatagagattactgccgctaaattggccagatattgtcgatgatgatctgcccgcccgaccgtcgccgaccacgttcgcaccgctgaagagctgcgcggacggaccgaagagatcttcacctggatcaggaatggagatctgaaggtgaacatcggtgcgcggtatccgatcgccgaggtggccgatgcattcaacgcgcttgagtcccgtgcgacgaccggaaagatcgtcctcgaacactgagttctcagcgcggaacactgagttctcagcccacggtcgcgagatctactgcgtgagcttggcctcccgcagcccgtaggtgcccagcacatagggtttgaagtcaacgacgtcgctgctgattccgtacaacgccttctggtaggcgaccgggatgatcggggcatcgtcggcgaccttctgctggatcttcgcgtagagctcgttctgcttgtccggatgtggtacccagaatcctgggtaagggttaaaatattgtggtaaatgaacgcatcatttacctagtaaaagtttaggaaactaagctcccattgtaactggggatagtgatcccatggtgtgacctaccttggcccattctcaagttccccagctattcccaaacctagaaaagctgacctttgttgtgctaatgcccacaacacatacgatgtcatgtagaattgggaattcttgacaactgtcctcattttcatatctacatgattagctgtaatagttgcctagttgaaggtcgtgttgtgggtagtgatgcagtatagaaaatagtacatccacaccgagaattcccaggcatggggccatctgaaaaccctgcataaaaagattatacctgcctagatgggctctttaaaaaagtttgccttttcattttaaacatgattatagaaatcaccgttgttcaggcaaagtagccattatcaggccactgtaactcattgttcacagcatgttctaatcatagcaaaggatgtaaaaaggcataaatttgagatttgagtttgcaattatgccttgaaaaaaacagcattgtcctgatgcttggacttctgtaaacaggggaaaagcctcattgtactaatgaagggcatactggttttagttttgatatattttctaattcttcagacgagaggaaaggtgttttagagagggtttcacaaaaaattttacttcctaaattggtaattttcctctatagtataagagacttaaagtaccaatacccaaagagcctcagaaaaaatgttttcaaccaagttcatagtgcctggggcagctatcgaaccggtcacgtcggctcggcgtcgacgcttgccattggcctgtatgaggaactgacggaatgaaggggtttcccgataggcgcagtttccttgcgcgttattttccggtgttcatgggcaccatcttcatggcgattttctctggttcggtggctgtctccacggcgggcgtaacctatttgcgcggggttgaaccggcgctcaaggccaactactccggggctgcaatcctggtgctggtggcagtgttggtgtttggcaatgtgatgattgcacgcgggtatccctgggcgacccggctggtggcgggctacctggtgtgttgcctgctgttcgtgttgccgatgattcaatacggcctcaataccctggtgtacggctcggcggtgctgtttccgcgtattttacactgcggcacatctcaatttggacttgacatatagtatttcagatactcaagggacacgtggctagcggtgactgtatcagacacagcaattctaaatagtcatagaaatgttttatcttacagtgaaaaatgtaaagaagctgtaacctcttctgggttcattgttagctttacattagggtttctgatggtatctgtgtgctgtttctctatagtgtaacaaaccctccctccaattgagtgatcactctagcttgccccacggcttataatctgcccttagttaacatgtcaccaggtattatcaaccttgttgctgcctctccacgcccactccaggccccaaagctcttctcattctgtaccctcaccccaccctgctccaagacacacgctcttctatacgcatatcctcgccagccccacttacctcaagcaatacggcacgccggacacggtggccgaactggcgggccacaccttgctcggcttctcccagaccgaaacgctcaaccattggccgctgcgccatgtggaaggcgaccgctggttgatccagcccagcgtttctgcgtccagcggtgaaaccgtgcggcagttggcattggaagggcagggtatttgctgcctgtcgaacttcatgaccgtcgacgacatcgacgcagggcgcctggtgccggtgctggaagcattcaacagcgggtatcgccagccgatccatgcggtgttctaccgcaactcgcagctggcgctacgcatccagtgtttcctggactttattcaggccaaactggcgcggtatgcctgctgattcgtgaccaccataaacgccaaactgtgcccgcgaactgatcatttgtgggagccccagcgcgggcccctgagcggaatggagcgccataacagcgccgccgatgacttgcccaataaaaaggccaattatcgcccatacaacatcggccccgaaaacaatcgccaaagcaccattcacgacagccgtaatctgcatattcactccgaaccacagtgtgaactgactcttcggagtgccgtgcctttcgccgtcaggaaccatatcaatcgttcgcttctcaacaccgcgaccagccccagaagcggttggagccgtatttccatgacgaacttcatcctgagcactatttggcgcggacaccacaattcctcctaccgagcgacggccatgtcgctttacagtcgcccacaaggacttcatcgaccaatgccatcgaagggatgacgcattttgtgttgtttgccaccttcatcatgttgtcgttgctggggctctaaacgctgtagatcttaatgtgggagggcttgtgtgggagctggcttgcctgcgatagcatcacctgggattagctgaaaaaccgaggtgtctgcatcgcgggcaagcccggctcccacaaaagactgctcccacatttagagctgcgtcaggctcaagttcctgcgatcaaggctcttgccgcttgggtgtgatcagcaatcaaacctttgaggtccagtccttcgacttggccgtcaatcacccgccatttacccgccaccatcacccggtccgcccggtctgcaccgcacagcagcagcgcggaaatcggatcatggctacccgagaagcgcagctcatatcagcctaacaaatacgctcaagtaaatcagagtagtattgctaaaggtagaaaaccaataacacgttttatttgcttcattaactcatatttaaatttatgttgcaatgatgacactaatcctaaatgatatgtgcaaaataaaaataaaaataaaacatccataatctgtgaaaagaaggcataaatctaagaaaggaaatcacacacttcaaaaaataaggaagattgacaaacgagtataacagaatcaaggttattgactcgcgtaaagatggaaataagaagaaacaacaacataccacaaggaaaaacaccctactggaatcaaaggatgcatgacatgtttagtttctacaagtatttttggtacttggggacaatagggagcactaaatagacaaaacctaaagttggaagatcaatcggccaaaataaccatgagcggctacgatattataagtttcttcctcttgaccgaatctgtaaccttcattagcagattcattttctgtggtttccctgatcaaactagaagttaccaaggaaccatgcatagcactgaatagggagccgccgaataccccagctacgcctaacatgtgaaatgggtgcataaggatgttgtgctcagcctggaatacaatcatgaaattgaaagtaccagagattcctagaggcataccatcagaaaaacttccttgaccaattgggtagatcaagaaaactgcggtagcagctgcaacaggagctgaatatgcaacagcaatccaaggtcgcatacccagacggaagctaagctcccactcacgacccatgtaacaagccttcgagatcaagttgatcccatagtgtgaacagcagttcgcgtcgttcgctgtcttcgccaagcagacgtttccagctgccttgttcagtcacggcattgaccagaaacgagtagttgctgccgttaaccaacaaatagtccccgagcgatagtaatgcgcgctcccatgaaaaggccttgtcgacggtaatcaacccttgagcatcaaacatcgcctcggccattcgcagcgaatcgctgaaaggttgtttgagggccgcgtgatcggacaactctttgggtgacgcacgtaccgcaattgccagcccgctatgctcaagaagaaagccgatctggccttggaaataaccatggagctctgctttttcgagtggctcccgccagatggcgtcagagagcagcaggttggccttttaaaatatccggccatatagcgctcctgattgccatgaattgttgttgcaagtcccggccatggctgcctgataaccaggctgccagcttgctcatccttaataaattccccagattcatttacaatagctggctcaatgccgaaaaatggttgtgcagcggagcctggtttaagcggcgtaactccgggaattggggcaataagaatcccgccggtttctgtttgccaccacgtgtcaatcacagggcagcgtccctcgccaacaatatcatggtaccattcccaaacatccggattgattggttcaccgactgtgcctagtaaattaaggctttgccgctttgtgcgtttaacccagatatcgccctcgcgccttaaggcacgtatagccgtgggggctgtgtataaaatgggtcacacgaggctcctgctcaaatcagccattctcactggcgatacgctattgcatttatttttagattcaagcaagaaaataatgcatgcaaaatgtaagcatcgatcatctgttgttccatggcgcggcggtggtacgaatgacaactggattcactcgcgatgacatctcacatggccacgccgctgaccgccgtgacgctcgaccacctcaatgaggcgcgggaggactcgtcgctgcatggcgagacgctgacgcggctgcgcgactacatcgtcgagggcaacattcccgacggcgggcgggtactcgagcgcgaattgtgcgaactgctcggaatttcgcgcacgccgctgcgcgaggcgttgaaggttctggcctccgaaggcatcgtcgacctgttgccgaactcccaggtctactatggcaagtcgattcgtgacgccagcctggcgcagatggcaatgattgccggcctgccaaaggccccgtcacgctttaacccactggccaaccccgcgcgcagcaaagagcgtcgcgactggatcctggggcgcatgtacaagctgggcaagatcgaccaggccgcctatgaaagcgccgtcgccgagccgttgaatgccagctatcacgtgccgacaccggaagtgaatgcaccgtacatcgccgaaatggcgcgtgccgaaatggtcggccgttatggcagcgaggcctacaccgaaggcttccgtgtgaccaccacagttccgagcaacttgcaggacatcgccaacaacgctgtccatgacggcctcatcacctatgaccagcgccatggctatcgccttcaacgatgtgccgttcccgctcgagggctgaagaaactcgtcaaaggaaaatgttcaagggtgcccggcgtggtatggagagccttcggtacccagcccagcgccgtactgatgggtccgacgacgaggactgagtgctcgccgtcagcgtcactacagcggcgacggtggtgacacaatggagacgacaacccgcgatttcaggagtgacacgtcaatgaccgtgaacctgggtatgcctacccctcccgttccgaccctggcgccacgtcgtaagacgcaccagatcaaggtgggagatgtgctcgtcggtggtgacgcacccatttcagtgcagtccatgacaaccaccaagactcacgacgttggtgccaccctgcagcagatcgccgccttgaccgctgcaggttgcttttaataatgagcaagaccgtgtcgtctccggcaatagttcctaaaattcctgaattcgaagagtcttttatgctaaaggaaacgtatttacggtctatataataagcaagactgtttgcattgccaggatgagtttgcagaatgattagcccaaaatcagaaatctggacatttagaaccagaggtaagccaggctgattgtaatcaatgattttgtaataatcggatacttttgcaattttcattttttttaagcgacgagaaagagttgcttgaggaatctcataccctctttttcttaagctgttctgcaaatcactttgttccgcaatactttcagtttgcactatcgataaaatcaaatcatccaaaaaggcatcatgagtcaattgctttctccctgttatcaatagtcaatcagccctacaaggtttcctaaaacaataccatttttatggcctaaacctgatcttggtaaaatcactgccgccagctttggatcggcaatataaatagcaataccggtgggtagcaatactgtttgctgaggtgctacttgcataggctccgagatacagacccttaaatccagaccggcggacccatcagtggcataggcaggcaatgaaatggtatctcctatccttgaatccagaatttttaactgaataacttgatgcataataattctcaatcgttttattgcgcctaattttgcagacttgcagcaaggattgcaataatttggcctgccaggcgtgttttatgggttaatggcagctctatttgtttgttttttgtaatcactgttacttgatttacatccacgagaatctctggtaatggtgtgtcacaacttgaatctttgagtacatagttgatctgtgcataagtaatttgagtcttgttgtgtgcattcatgattgagtcttgtgtagcactgtttgagacaacctttttgaacggctgaacttgagtttgcttgaggacaagcaaaagtttaagttgggggtgttgatgagtccacaaattggactcatttaggactttattttgatagagtaatggtgtcctcaaatgcttattttgtgccaacaactgatgtaaaatccttgatttccaggtatttggattgaggaacaaagcaaggacactaatttgcaaaacggaatgaatcaagcagaaagaaggaagaaaagagagcctggtgatcgccaagtccatttgcgagtcaccgagtcttgccagagaccatgatatttgctggtcttagcagagagatcccacaataaaattggccacacccactaggtccaatagcaattttcatgggaaggttatgtcagttaccttaaaatagtacttcttcagtgtgagtgcagatacccaggaatcctgtaaacatgcagattcaggtttcgtatggagaggactgacattctgagttgctattgaacttgcagctgatgtcattgctgctggtcagtgaatcacattttgagtagcaaggtctcagatttttgttggactgttcctgagatgtgaggaattgttgttctgtctcaaagagcagccataaaaatcgtggacctgaaattgtctgtggcagttaggattaggattagctctaggtgcctattagtggcttagacctctagagcggagaggaagaccactacactttcttggagtagaaaacatcccatcacgggccttgacccatctagtattatatagggacaactagtagagactttgctttctgtagagtaacgccaaacttttctttcatatctatctgcattggatcctcaccattaggaagtgaccactcaaagtgatggatcaaactagctaaaatcaagtgaacttcttgtctagcaaagggtaagccagggcatattcttctcccagcaccaaatggtatgaactcaaaatcttgacccctgaagtccacattggagtcaagaaaccgctcaggtctgaaagataatgcatcttcccatgtgttagagtcgcgccctatagcccaaacgttcacaaacaacctcgagttctttgggatcgcgaagctgaaggagctcggcgagttcgtcaagagcccctcgtccaccatcgagccgcccgtggctcggaagcgatctcatgtacgcgtggttttgccacaattctcctgtcagaaggcccaccctcggacagggcggaccgtttaagcgcggacgggtctcatctcgagccgttcacttcgtgtccatagccgttcagcctttgcgctggtgatcaatctggaaatcctgcgtgtccagtgggccggacatccgcagagctcgtccgaaggcacgacgccgcagggcggcatccacgcattccgtcgtgtcatgcacccacgcgccccgcccgggaagcgaggcggccggatctgcgatcaggacgccgtcgcgggccacgactcgcaggagtgaggaccgggaggcacgcgtgatagacccggggctttgggcgttatcaatcggacgaattcctgggaactgcggatatagcttgccacagtatcttatcagttaattgcattcttggatgtgctgggagtcagcttgcacaagttacgtccttgaggaaggggctgccagtgaaagagccaagtggagtctgtctggctctgttagctaagggagtgtcaattcaggtggaaacaaggctaggtgattaaaggaaagggagtctaaaaacagagttagtaaaaaccaggttgggcactacaatgctccccaattccagagtctccattgtagactgcacctttaagagcaatggacttcattaatacggagctgagttaatcatactcttctgttaaagccatgttaacattgtttgtccttgcaaagcacgtttggagtcgctactgttgcatagggtaacaatatattttgtaaatctgctttcgcgtcatcatccatcaatgaatcaccacttttagctaacataactggatcaataacatatggtatctcaggatatttcactaagtattcttgaattaattgcatcatttcctttgaagcaatcataccagttttaatggcatgtggtaattcgtcatcaaacacacttgccagttgttcagataaccactgtggctcaagattgtgaatatgttgtacacctttagtgttttgcgcaacaatgcttgtaacagccaccataccatatacgccacaagcatgaaaagatttcaaatctgccattacaccagcacctcctgttggatcagtaccagcaattgtcaatgcaatattgggtgtagtggtgtagctatgtctatgtacaacactgacgactctattcgtggatttgctcacagttctttccaaatggctttgcaaaagaaaatgccactttatctttccactaagaatacaattttgaaaaaatatgatggtagatttaaggatacattccaagaagtatatgaatctgattacaagcaaaagtttgaggaactaggtttatggtatcaacatcgtctaattgatgacatggtagcccaagctattaagtccaatggtggttttgtttgggcatgcaaaaattacgatggtgatgttatgtcggatgtggttgcccaagcttatggatccttaggcctaatgacttctgtcctcattcatcccaacggtcgcacttttgagagtgaggctgctcatggtactgtgctggatgcgatgtgggacgatggccagcgcacgtatctgcgctatcccggcaatcgtccggcgcccctggcctatcaggtcatggctgatggcagtgaagccatcatcgggcagaacaccgtggtcgactcagcgaccaggggcagcctgctgatcatccacggcgtcgtgccgatgctccggctgcgcgacggcaactccgtgctctgcatcacgaacaacgcctatgacccagttgggcatcggaccgggaccggcaccgtcgaccccggcgtcgtgcgccaggtcaggagcggctcataatgctcgggaacaccatcacgccgcaaaccgacgccacgacgtcgcagatcgccggacccagggagagcaggaagaaaaagctcggcaaggttctgctgagcaccgttgggcacgttgaccgcacggccaccctggcccttttcggtccgtgccgcgtggatcaatcgggtacgcacccgcgacagcggcgccagtggcttgaggctggcgatttccgcctcgctcatctgcgccagcaggccgatctcccacgccaggtactggcgtgcggcatccttgttcccactatgacggtcgtgggtgaaaaacaggaagtcgatgcattcggcgtcaggtgggttttgcccatcctctgccacaggcaaacctgcagcaacccacgcctcgaatccgccgtcgagcagtgttgcgtccagcccctgggcagcaaatgccgccaacgcaggatcatctgccaccagcaccaacggtcggttatcggccttcaaccgcgaacgaatcgaccagcgagcgccgggaacttcaaaaggtttccagaagaccttatccctcaaacctcatgtggaaagagagattccttaggttgctgtttgagagaagagatatccattgggacgaagctgacagaatggcacccgctttcttaaggatcctcgctaattcaactagttttcttttccgggaatgaactagcctagaggaaatgggcgtcaagcctataagtcaagtacgcaagaagagtttataggcgaagacactctcagtcgaaggtagggcagtcttcctagctttagggtcaatcgaatagatagaagatctagcgcctcggtcagagagaatggggcacgagttcgtgacctaatagaatagtgttttgtgatcccggggaaagctatcatagtgattccactagacttgaaagcaaatgaaacagcgcgctcaaggttgtaagctgtaccgttatcacggcccgccaactgggcaaattcgaccttcatgggtattccttgttctcaatctgtgccgcagtatgcgcagccacaccaggccagggaattacgcggcgggggtaacccgataggggtagataatgaccatgtcgctgcaagacatcgcctggcaccgttcggtggggcaaatgatagacgccctggaccaggccaacttctggacccaactggtgcggttgctggaccaatacgtgccgttcgacagttgggtagtgctgctgttcagcagtgagcaccggccgttggtattcgccgagtgccctggcgccgatggcacgccggaccatctgttccaggactacctcaacggcctttacctgctcgaccccttctcatcctcaccgccgctgtcgatcaggccgatgccgcgaatgttgacggattgctgtccgatcgatatctcgcggccgccgacattgacgttggcgttgccgagcgccgccaccagctgaggcaccgtgatgttgtaggcttcaagcttctgcagatcggcatcgacgttgaattgcttggtggtgccgccccaggaattgatctgtacgacgccggggatcgtcatcaggcgccgcgccacaacgtaatcctgcaacgtacgcagattcgtcagaccgaaattcggcggccccacgacctgatagcgatagacctcgccgaccagactcgattgctgaatggtcggcacgagattgcccggcagtgttatgttctgctggatgctgttggcggtctgcgtcagcgcaaaatcaatagaacaggccccgacacgaatgccggggcctgtaatgaccacatccttgtggtcggtcgcatgaacacgtgaggtgcattgagtggatatctagctcactcgttgccgccgacgcttagttcaaggcgataaattaagcgttactctgctttcaggccatcagccgatacagctttaacgcctttgattttcttggtgatgttcactgcggtggttttctgtgcatcggtcactgcgacagtcgacgacagggaaacaacacctttgttggtttcgactttaatgtcggtaccaggaatacctttttcggtaaccagatcagctttcactttggtagtgatccaggtatcggaagtagcgccttttgcgtcagaagcagcagccttggttttatcaacgttgtcagcgagcacggcttcaaaggcgtcatcgagctcctcatctcagaagcgatgctcatcgctcatgacgaaggcctcggctggatctccctttccggcgccccattggcgggacaaccagacgaacctaattggctcgacgtcgccctcaaccgcatcggtgaggaagtcgaaccgctctatggattccgcaccctagcggccagcaagcgcaaattccaacccgaggagcacccgtggtacctctgttaccacgatgaactgaaacttccttccatcgcattggccaccatgcatgcctacctgccggatatgaaaaccaaggatgcggtatcggcggtcagggcttggatggccgcgtaaatacaataaggtctcccttcttggtacgaagtaccaagaagggagaccttaggcagagcagaccgaaggcgaactgcagttccgcagccagctggattacgtctctgcctaccgtcgcattctcgatcacttcgatgcggtaaaaatcgctctcaccgccaccccggcgctacatactgtgcagattttcggcgagccggtttaccgttatacctaccgtaccgcggttatcgacggttttctgatcgaccaggatccgcctattcagatcatcacccgcaacgcgcaggagggggtttatctctccaaaggcgagcaggtagagcgcatcagcccgcagggagaagtgatcaatgacaccctggaagacgatcaggattttgaagtcgccgactttaaccgtggcctggtgatcccggcgtttaaccgcgccgtctgtaacgaactcaccaattatcttgacccccgtcaaattgacgacattttccttcatggttccatacttgtaggcattggttccactggccgaggtgcccaccattccagcaatagtagcaccaatcccaggatcgggtccaaacatcaaatgcttcccattgggcgatgacttcaagaaatcgtcaaggtcctgccaacctacaccaggctgaaccacaacgtccaagtcgtcgggatggaaagacacaattttgtcaagatgagcaaacgaaagcgaaatactctctggaccccgtgtgtgcatgttttggccctccaaagacgtgagaccagagttggctaccactgggacgttgtactcgtgacatattttgagaatctgtgacacctcctctgtagactggggatatataataacgtggggacgctgtgtagtgcgccgtattcggcggtcaaccaaccctggccctggcccttgaggaaacgcggcacgccgttttcgacgctgacggtgcagatcaccttggtatcgccaaactcgaccagtacagaaccctcggcgtgtttggtgtagttgcgggtgatgcggatcgagcggagctgatcggcagcgcgaccacttggacgtttcataggggatacctgtacggaggacgaaaaactgccgagcattatagagccgcgaaccgattcggggcacttctaaaaaattcggttacgaatggcgagcctattgcccattgtttgggcgcgctcgccccactgcgctacaatcctgcgccttcgcagcccgtcggcttcaatttacccatcagcccgcatttgtgggactgcatcgcgaggtacctcgtggtggaacatgcgggcgttttgtttcggtctttgcacgccggggtctgggggcttgtgcgaagttggagtttcgggtgggcgatcggagaatgagttaccgtcaggttgcgtatgcctattccacggcacccgcttacgaaaaacaatcccgctcccgtaagaccggtccgcagaacgtggtcggtgcgtcggcactgtccttcgttgcgctggccagtctcggcatgctggctaccaatattctcggcgataacggggcgcctgcgttcggcaacaccggcgcggagatcgtcaccatcgcgcagccgcgatcactcgatgcacgcggtgccgtcgcctcgctcttcagcgcgagttattcgctgagcgggccacgcgtcatgttcgaagtgcccgcactggcgaagcgccagcagctcgccgttgctcggattgatggactccagaacgccggtgtcgctggccgtcgaccactctccgctgccgaggtaggtaccgggttcggtctggctcaggccgagggcggtgagtacggaatgcgtcattgcaggctccagagctttagatagcccgcgtgcagcgggcatgaattcggcgagtccgctcgatggccgactagtttgatttggtgaccccggcgcgattcgaacgcacgacctgtcccttaggaggggaccgctctatccagctgagctacggggccaatccggaggattttcgcacgaaccgttcagtagtcgggcgctccgaacgaaaaacggcacctttcggcgccgtttttcgtcgatgttcatggtggagcggatggggatcgaacataatactctgagcaaagcgtatgataatcccaaatcggacgccaaaaacagagtaaaaattttaatagaaacgacagaacacttattgaatatcgaacatcactcttatccacaattggctaaagaattatgcgcagatctatatgctctattatgtattgcgaagagatcgcttaagaaaaatgaaatactggcaagctggttcatcgatgttcatgaaattaataaaaaactggaagaattattagcaaaaacagaagaaaaagtcgaaagtttggacaaaatcctgtcagaaaaactcaatgaatcacttgagacttccccaaaagacagaacgatacaagaacattttaatgagcgtttcaccgaaattttaagtggggacgagaaacaaagaacaaaactggatgttccgtccaccccattgtccgcgtccagcttgcaccgtcggtgatctggttcggtttgatgagcggatcggccgcgaggttgttgacctcgaggaggttgtcgccaccgagcagggttttcacaatacggctatgttgcgtcacgatggtggcctgatcctgcgtcacccatttctgctgcccgttttcatcgaaagcgagcaccacaaacagttgcgggccatcgttaagctgcatgtactgactggcataaggcatgttctgaagctcgtcatcggtcagatgcacgcccggtgtgccgaacaggctttcccacagcgagtttcccagccctttagtggtggccgagcatgcctgcagcagcaggcaaatcagaatgattgctggtcgcttcacgactcttctccgacctgccggaagacgacctgcaaaacatcctgctgaccagcgcccgccacctggaccgcaatatccagatgctcgaacgcggcggccagggcccggaccacccggtgcacccggcaattgccgagacgcgctacatcaagagcattacctgccggttgttgcctaacagctaaggtaggccgcgctctgcgatagagcgcggatcaaaatgtgggagcacaccagctcccacatttttcgctgtgtcagaaacattgccacacaggtccctacgcgcatcccacaacgtttttgattgaatttcgcaggtcgcagactagtatcggttgctggtttcactccggaaaacaaaaacaatgtctgattccacctgctcgctcccgctcagtggcggcgccaagcatcaacaattaccaaaccccatctcatcactaccgaaatgccgcccccaattgtgccaacatccagtcaaattaccaaacactttccccaatgtaccaaaccccagctccactttaccaaaataccccctcgaactaccaagctccacatccaaactaccaaaccaacttatatcccagatatcaagccccccgtccaaatgctccaaattatcgccaaatccctccccctcaacaaggcaattacgatccctcccatcccagatttgagaagaagcctgctagaattttcgctccgcttattgaaagccgaacaaagttgttcgagcgattaactgcgacaggatatatttatccagtggggcccaagcaggttgacactagctcaaagttttacagactagatcagaggtgcgcgcgcacaggctgatcacatcgtcgtcggttttcggtttgggcaagggttcaggcggttcggggagcacgtgcaggaaattcatcggccttacgcccggcgggtatcgctggacagagcggcctgtacggtcaacaccgcaagcccggcacgcgctgcgtacatcgcccacatcagctcggccgctgcgcgcgcctggcggcgtttacggtggagcgtgaagtcgatgacgttggcagttgtttgcatgggggcgttctcgtgggacgtggttgactcagtggctccacagtaatcgttgagggttatttctttaaatactgagtttgcatgtggtaattcgattttggacttagaaaataatcttggtccgatgctgttgtgggaaaggtctggtccgttatttaggcgctcgtaaggtgccgagtgcgtcaataaaagaacaacacccgatccctagtcggcatagtttatggttaagactacgacggtatctgatcgtcttcgatcccctaactttcgttcttgattaatgaaaacatccttggcaaatgctttcgcagtagttagtcttcagtaaatccaagaatttcacctctgacaactgaatactgatacccccgtccgtccctattaatcattacgatggtcctagaaaccaacaaaatagaaccataacgtcctattctattattccatgctaatatattcgagcaaaggcctgctttgaacactctaattttttcaaagtaaaagtcctggttcgccttccccgaaagaaaggttacccagaaggaaaggctcggttagatccagtacgatcaaagtggctatgcactttttacctgatatgtatgtgccgtgtgataactgtcatggtgaacgctataaccgtgaaactttagaagttgggtataaagggaagaatatttccgatgtactgaatatgacggttgaagatgccatgcatttctttgatgcgattcctgtgattcaccgtcgtttggaaacgttaaatcaagtcggtttaggctatattcgtttaggtcagtctgcaacgacactgtcaggtggtgaagcgcaacgtgtgaaattagcacgtgaattggcaaaacgtgatacgggtaaaacgttgtatatcttggatgaacccactacaggtctacatttccatgacattgctaaactgttagatatcctccatgagcttcgtaataagggcaataccttgtttgatcatctctagttagacctaaacttgctgaaattaatcctatcattgcactttttgagggatggggatctgattttctagtttcaaaactagaatctgtcccccatgattgcaaaggtcctgaacattttaataaaattgatttcatatgcctccaccttattcatctgatagttgttgacttaatttctttccaaattcatttagcatatcactcaatttagtaaaattatcgcctaagccatccgctccaatattcaacataaatactggctcatctacaaacccttgaattttattatattccttaattaaagcatcaactgacgaatggatgtatccttttgccgttgattcaaccggttgttcaaatgcggttaccaaattaactggtctatcacgcgctgcggcggtgaggcccgacagcaggattttggacagtgttttcacgcggtgctcctggggtgagagatcggatgcagcaggtatcgctagcgggagggaatatcccgcaggtcgtcgatgatgtagcggctaagcccgccagtgaaatgtcgctcgacactggcgttgccggagttggtgatgatgccgccgatggtccgccattgctgcgcttggccggcccagttgttgggcaccaggcctgagcggtcttgggcgaagtgcagcacttcggccccagctttcttgaccttgaccttgtagccgaagtcgatgctttgcaggatggtgccgtcatcaatcaccagggtcgagagtccgccgttggagtcgatgatatggcgcacatagacgatatctacctcgtacccgtgaggctggcgagcggtgtataggagaagatatcccacagatcatagaaccagccaagcacatcggggttatcgctcagtgtgaggtattttgtctcgcccatcaacggcgtcggttttgagaaggtcggcgtcaaaatgatatcccactgttcatagaagcgacccagcgtgcgcgatgtgctattgaacacatcctgcattttccagcgttcgctgtaggacatatcaattcctttctgccagatcttgatgttgatcggttcaaccagatcctcaggcggtgcggaaagtccttttttctccagcaatcgctggataaattgggcaaagttactgatataacaggcggtctgtgcccggaacgccgcgtcgaaatcaatatcgggcgtcacccattctttaaaggctcctttaaatactgaaaggcatctccttttgaaaagtccagcatgtctataatctgttgttgacatctatccccactccaccaagataaatgaaaactctctgcagatgctacagaaaattcttggaaacattcaacatccccctaaaatgttgctgtgcaaatgttaaatcctccaaaaaactggtgcagtgccattttatgaagatccaagcaacataggtcgtggttgatgctaaagtatgttggtgtacgaaaggaacccttcctagtgtcatgctcacaattgcatttttacatacacaatgtgtgcactttgagtgcatagttccgcattagcatgtgtagccattcaagctcctagggtgtcatgccagctccaacttcagtagcatagagcgagtaacccggccgttgcctggtcggcgggtgcgatgatctcaacgcttgatgatctccgcatctggtcaaaggcgttggcgaccggagcgctgctcaatccccaaacccatgccgagcagatgaaattcggcgccatcgcgaccaaaccgatcaacgtgggctacggattggggatcgccaatttcggcggcctggtcggtcacaatggcgcgatcttcggctataccaccgcgatgttctatgtgcccgccgctgacgccacgattgtcatcgagggcaaccttgcctcgaatttctcgaattcagccacagagatcgcctatgcgctcgccaagcgattgatgccggatttggtcgaatagtttttggctgccgtttattgcgggaatccatagcgcctatacccccactacaaatcgaattcactgctgggcttatcgtcagctttaactgagtgggttcgggcgccgttcaccggaccacagcccgactacggaggcgctgggccagtttggagtctcgctgttggcgtggagccccggctcttggaggccccagtccgcagctgcactcgctctctcaacggtcacgggcacttgccctctgcaagggatccgcgccacactgcgcacgtcggtcttgctcaggtacagttaggttgaagacgaaaaggctgcagatactatttgcaaccgcgcaaccaccttctttttgacaattcgatggtttcgatgctggaatccctctgcgtctcccgacgtgtgctgctgctcgtcatggccctttgtgcgactgcgtgcggccttacctcatgcaccctgtgtcctgtcacacacaattgcagacatgtgcgtggagctacgatgctgctgaaggcagctgtcctgtgttaattgaccgtcaagaggcaaaaccaaaacgggagtgtggcagaggaacgacagtgctcctctcccgccatctcacgcgaggcagcaatgccgtgtggcgttgtgagacgacaaagaatctgattgtgatgagacgcgcactaacagatgaatgccgctagcttgcctgcaatcgtcgtgcagcaggcgccagggatcaggacgagcatcaacatgccaatggctgccgctttttccgcctgcttcatcgtgactgcttgcccgatcagcagctggtcaaatagcagctgagagcgaacaagatacctgtgcgtgcgcgtggctgggtatccatgatggcgattcgatcattcttgatgctggcagtaccgttttgcagatggttcccctgctctcgcgctttaataacatcacggtgatgaccaacagcctgcatatcgtcaatgcgctatccgaactggataacgaacaaactatcctgatgccaggcggaacgtttcgcaaaaaatcggcctcatttcacgggcaactggcagagaatgccttcgagcatttcaccttcgataaattgtttatgggcaccgacggcatcgatctcaatgcgggcgtaaccacctttaacgaggtttataccgtcagtaaggcaatgtgcaatgccgcgcgcgaagtgattttgatggcggactcatcaaagtttggccgtaaaagccccaacgtagtttgcagtcttgaaagaaaataaagaattttcatggagatgtgatcacctcaactaaaagtataggggaggaggctgtgacagtgttcaaggatcaattcatggaaaccaattgcacaaacaactatgacatgttggaggccattcctaaagtgattacagtatatcagaatgagatgctaactagaatgcctaggtaggaggaggtaaaagaggtggtatttgccctgaatagtgatagtgctagtggtccagatggattttcgggtcatttttttcagacatgctaggatatcatagaggaggacataaccaacatggtcaaggctttcttttgtggtcaggaattgcccagattcataactcatactaatttggttttgataccaaaaaaggaggagattgatacatattagtcttagcaaggcggccctggggcaagaccaggtcgttgatgctctggtaaccgccgagggcggtctggatcgcgtgttggctcggcacgttggcgcacaggcgcatgttggccagcatgtcgatgccttcgatgtagctctgggcgttgtgcttggggccggaaatggcgatccaaccggagcggaagcccgccacgcggtaggacttggacaggccgttgaacgtcaggcacagcaggtccggtgcgagggatgcggtgcacacatgcacggcgtcatcgtagaggatcttgtcgtagatctcgtcggagaacaccaccaggttgtgctggcgcgccaattcgagcatgcccagcagcacttccttggaatagaccgcgccagtggggttgttcgggttgatgatcaccagcgccaataataaatttaacaccatatggatcaggagctaaaatagtacctcaaaaatttggtatagcaatggaagctatttattttactatgttaaatttagttgaaaatcaaattcatagttcaaaaactgtatcaggacaaagctatttcccattcatttggagtttatttgttttaatcttattttctaatttcttaggattaattccttatggttatgctactactgctcaattaatctttactttaggtttaagtatttctattttaattggtgctactattttaggattacaacaacataaagctaaattctttggattattcttaccttctggtactcctactcctttaattcctcttttagttttaattgaattcgtttcttatattgctagaggtttaagtcctggaaccggcagcgcttggcgacgcagtacggctttgacccgagccatcagctcgtcagggttgaacggcttggccaggtagtcatcagcgcccagttcaagtcccttgatgcggctcagctcatcacccttggcggtgagcatgatgatgggaatctggttgtttgcgccgcgcaggcgtttgcaggcggtcaggccgtcttcgccgggcagcatcaggtcgagtacgaccaggttgaagacttcacgccccagcaggcggtccatctgctcggtgttaggcaccgcgcgggcacggtagccctttgagttgaagaaacgctccagcaggctgctcagccccggatcgtcgtcaacgatgagaattttttcgccttcagcagtttgtgcagtgctgctcattggaagggctaccggcgcagattgcaacgcatctgcagtcgcgccagctgagcgtcaccttaagcgaacagttcaccggtggcctgctggcactgcagctgtcgcgcgtgaatgctccgctgctggccagcgaggtggtgccgttccagcaggagacgctggcgcagacggcgcgctgggcctcagaacgcagggttaaccattttgccggtctggcgctgtttgtcggcggaatggatgaggaatacatcaactttgcgctggcgacgccggaagggacacatgccttaagagtcaaaatgagtatcacccgccacagcctggcggtgcgtcaggaaatctgcgccatgatggcgctgaacatgctgcgtcgctggctggcagggagagaggtggccagcgagcatggcgctgtacatggcgactttgccccttgtcaggcaggagtttgacgccttgaaagccgtgtttgtcgacggccagttaccccagggctacgtgatgtatggcttgtacgtgtgcgcatcgaccgaaatgatcgccccggcgagtgacgaaatggcccgctacttcttcacgcctgtcacgattgcgagagcactgacatacgtgaccagcccccgaaatggactgacactgccgctttacctgctgtgttcggacggcgcattgctgtggtacaccacgccgaaaacggcggatgtgttgcagacgtggttgaataagctgtacgacgacgctaagcgagtgcgtgaaggcaccctgacggtgcgcgattatgtgcgtctgatggcgggcaacggaacgttgcacattgttccgggtgcgccaggaggatgccggcaagcatgtcctcgaccaccaggtccggatcgttgatgactcgattcatagggtgtttccttgttcttattcgtctggaatcggtttactgaatgctgtagccgccgtcgatcaccacgttttcgccggtgatcatcttggctgcgtcgctgaccaggtacagcaccaggccggcgatttcttccggttgggcgaaacggcccaccgggatctgcaacttggcccgttcccccagctcacccgcccaggccttcttgcccagggcggtctcgacgatggtcggcgacacggcgttgacgttgataccatggggcgcccattccatcgccaagaccttggtcatgccgaccaccgccgccttgctggcacagtacgcaacggttaagtcaattattttattccgttaagattaaagagctcataaattaattatgttaatttatcttatttgagtcctaaccgaattttctaaaagtaattctttgggttacctctttaatttgttggctaaattgttaattaatcttactacaattttggccaaatctaacatttcatttccaacccatttgagacaaccattttgggccctcctcttgccaccttccagcagcccatattaattctcccataaaatccggcccaactttttttttccagcaaagagataactcaacagcttcccaacgttgctctccaacattctcaacgttccagcggctcaaacgacaaaaaacccagaagcgtcgtacagtagcagcagctagagcagcgtgctttcgtccatattttctttgacatgggggcttaagcgcgcgcttcaactcacccctgcaatattttgtccatcacgcgccccggcagcaggcgcttaagcaccattactgcccaagtcaccagcgttaccggatagcgcatcttcggcttctcgctaataaaagcatggcgtactttgtccaccaccgcttccggtcccaacgtaaagcgggcggcgatgccgggattttcgactggtttatcactttgcgtctggttgacgttgtcggtgaagcgagtacgaatgggaccgggttcgatcaggctgactttaattccgctgtggcgtagctccatgcgcagcgcgtctgaccatgcctccagcgcatatttactggccgcgtaagcgccacgacccggtgtggagattaatccgtttcgcagcggctcgggctactcgcgcagagttctcccgtgttgcagaaactcggccaaatcctggctcgcgatcaatgcctctcgcccgtcctgcgtcagtatctccgtgagttggaatcgcttccgccttccgtccccgtggaaacaattcaggagattttagtccaagaactcggatcgcttgaacgccgtggagtcactctcctgccgcccgcgattgccgaagcaagcgtggcggtcgtcatccccttccgacagtctcgtagccgaagtcgcaagacttcgggcgagcctgcaaacgaccaaagtcttgcgacttcggctacgagggagtcagaacctcagtgcatgtacgccgacgaaatagaaggcgtgttcaaagtgctgaagcctggtatcgaagccacagcgttgccgccgagtgccgccaggccatccgcctgatcgacaagaccctgggtgaagcctcacccgaggacgttgaagtcggcgtgccgatccagcgcggaaaaagcgggcccaagggcttgctgtcgattttgatgaacaagcgcagcgagcccaacagcctgctgccggagaatctgaacgacaacaaaatcatcaaccaattgatcgacctgcacgcgcgtgacaaggacctgcgcctggtgctggtgaccaaagacatcaatatgcgcctcaaggcacgagcgtgtgggatcgctgccgaggactacagtaccgaccaactggtcgacgacgtgtcgatgctgtcgcgtggttatcacaccatgaccggctcgttctgggaccgcgtcagcaaagtgtcatactccctgagcacctttcgatgagattttggcggtatgaccgcaacagctttcatgtctatggcagcgttgataatgtaatccgcatcataccctttatctgcgagtagagcggtagttgtctttccttcgagcaatgtcagtgcttgtgtaaaatctgaagtttgtcctggcgtaaggatgaatttaaggggattgccaagagcatcacataatgcgtgtattttggtagaaaaaccgcctttggagcgacctaatgcctgtttttcttgcccccttttgctccggcagcatgttgatgggcacgaatgattgtcgagtctatcatcagccactctgtatccgcgtcgacggccaatgtattaaatatcatttgccagattcctttcttggaccaacgtgtcatcactactggctggtcgatcaggttgacggaagtgtatagcgaactcggtttgatgaggttgttggcaaacaacgcgagcaaccgattgtgcaacacggtcgctgatactgcatcgacaacaatctgcgcagcgctcaaaagcctagatttgtcgagcgcctcgttgaaagcatccgcgtcagcgcctgtgagattttgagcgagatcctcgagcaaggcagcccacccagggtgtctctcgcccgcctccgaaacgcaactcgcagaagcgccggctccaaggaagatgactccgcggcgctgagaaagtgcctgaactagatctttcggccagaagtcgttcatgcttgaagacaattttcgctcagtctttcgccgacatggttgatcagtcctgtatgagccgacctgctcgatacgaccactgttgagtaccaccaccttgtcggccagggtcatggcttcgacctggtcgtgggtcacgtagatcatggtggcttgcagttctttatgcaggcgcgcaagttccaggcgcatctgcacgcgcaaggcggcgtcaaggttggagaggggctcgtcgaacagaaagatcttcgggttgcgcacaatggcgcggccaatcgcgacacgctgacgctggccgccggacaactgcttgggtttgcgctcaagcagcggccccagctccaggatgcgcgccgcttcgctgaccttgctctcgaccagtttcttgtcgacgccggccaggtccagggcgaacgacatgtttttgcgtacgctcatgtgcgggtacagcgcataggtcggcaaggatcgcgggaatcagtcgcataaggcaccggatgggaggagcgcaggctctacaccgatagcgatcaagtgttaagattgcttaaccgccttttccggtcacgatgaaatgacccgaaattccttttgccggacactttaaacgcgcttgacgcggtctttcgcgcggaccattgtgccgcccatgaacggttcgctctccattttcggcatctgccgcgagattattagctagctcaacgctggctggagccgtcttttctcacacgagatcactggacgcccggccgcaaggcaagggattttgattccatggagctgaagctctacgacacgctgaccaaggagaagcgcgcatttgcgccgctcgatccttcgaacgtgcgcatgtatgtgtgcgtttttttcaagcagaagacggcatacgagatggatgaaatgaaatacgatatgtctggcgctgccagtgtgctgggagttataaaagcctgtgctttgctgaaattgccaattaatcttattggcattatagccagtgctgaaaatttgataagtggctccgctgtaaaatcaggagacattgtaaccaccatgtcaggacaaacagtcgaaatcattaataccgatgcggagggtcgattagtgctagcagacgctttgacttacgcggagcgatataatcctgattttgtaatcgatattgctactttaacaggagcgataatcgttgctttgggcaatatagccactggctatatgactagagatgaacagctggccaaatcaatcgaacgtgccgctaatgacgcaggctcacgtgcacccccatcagttgccccagacgcttgacgatagacagccccaggcccacgccttcgacgtccttgtcccgcaggtggcgtacgcgatagaactcttcaaagacctttgacagatgctcctcggcgatcccccgtccctgatcatgaatctccacggccagcccgccgtcgcgaattctcacgccaatcaacaccggccgctgcgcgccgtacttgaagcagttggacagcacgttttgcaccatggtcgccaacagcgcggggtcgaccaagacccagtgggcacaaggccgcaagcgcaattccaccccggcccaacgggcggcttcggcgttctggcgcaccaggtcggcaaggaattcgcccaggtttaccgcttggtacttggggcgcagtactggtcttgatcaatgcctggccatgctttcgcaggcctggcccggtgcggtaatccagcacgccactgatgtacagctggcctgcatcgccaagacgaacagccgactcggtcattgcgcaggcttcccagcggcttgcttgtcggtctcttccttggccttggccacttcaccggcccaaccattgatggtcttgtccaggtcgttgccattgcgctgcatggcgtcggcgaactggtcacggaacagcttgccgatattgatgccgttgatgatcacgttacgcagcttccactcgccgttgaccttctccaacgtgtactgcacagggtagaccgcgccgttgttgcctttgacgctcatgttgacgctggtgcgatcgcccgactcatcgccaccgggcaatgaccagagaactgaagagggctgcggcatgagtaactatggctctgtcacgcggaagaaaagcttatggttcctcacgaatgcccttgagcggatgaggaaaatcggtcagggagggacggcattggacataaagaatcttgtctcggtatccaccgaattggccttgccaagtttttgcttcctccatgcacccatgctcagagcggaagatcgcttgaacggccacgggcgcggaacaagcagttgtgtagtccgagcagataacaaaccaaagtgcgtaatacatgtttcagggatcacggttctaaatggcacgcaagagtaccttatccgcaagcaacaggctcggagggccgctgcatgacatatcgcaacgttgtttcagcagtagttctattcatatatcctgcttgtgtgactgtgggtattatttgatttgattctattagatcaagttcatggtagactgtcttttctttctatgctacactgattttattatgctttttacatgccagtggttctcaataccgccacacttaaccttttctctgagaacatcctttcagtaatttatcataaaattgcacactgacttgagcttgggtgtcttcagtcagctttgtcttgatcacaattgttgctccagtccgtgggctttcagatcaggagaacaaagaggaatggaaaaaagcacacaacgaggaattcggagtcttgtgtaaatattatttacaaggaagcatgtacaataaatgccattttctttaaaaaaagtatttgaatgtaatatgtgactttcagtagtgcatcagcttgctgtaaaagggcgacagaggtattaaaattatcactccaatgaacattgatttgtgctaattcaagataataacgtgcttttaaaagaagccaatcattattttgatacaatttttgcttcatagctgtttgtaattctttatttaagctatccattttgcttgttaaatcactctgaatttgctgaagatgattggcattgttatccaggagcttttggactgtattttgctctacttttattctttccaattcatcagttaaatttttgttttcaacaagctgatggttttgaaattgtttctccaattgaatggaataaatagagacgatgatagcaaggaacgccaaaagcgaggtcaagctgattattaaggataggtatctgataacagagtttatgcagcaataaaatttttcctatatacttttttaggatcagttctcatgctggccagtttcctgtacatgggctatattgcaggctcatttaagatcgaaacgttttatgctatcaaattaggcatgactgcacaaacattgatttttattgcctttttcttaggttttgcaataaaaataccgatgtttccagtccatacctggttgccagatgcgcatactgaagctcccgctggtggttctgtcgttttagcagcaattttgctaaaactgggtgcctatggatttatccgtttttctttaccaatagtcccggatgcttgcagtaaatatgctcctctgatggttgctttatctttgatcgcagtagtttatataggactcattgagttggcccttccctaataattctggactaagtacatctagtttgcagtggcatttgtcttttgaagatcctcctggaatttcccagccaaatgggtgagaaacactattactggcaggtgtgggcttcaaaggtaattctcctcttgttctcattggaggtagaacggatcagtcagtcatattcttgttctattctctttctatgaacgtgtataaacaagaggaatgaatgggaaggctcacatttcattatagatgatgatcatcctctttcctacttgcaagttctgaaagatttcttgctggaagcctacctatctgtcccaccatggtgaattaaagcaaaaacgttgggctgataccattattcatttgaaagatatttcaagaccgtcccttcattgggagtgggttgcaccagaagtagctagtctaaccttcgggaggacggttaccacggtgtgattcatgactggggtgaagtcgtaacaaggtagccgtaggggaacctgcggctggatcacctccttaaattaagagcactaaagaatttaaagtgcccacacagtttgttttcgagaataaagaaacccaatgcacccgaaaggggcataaatgctaggcacagcgagagcgaagcgcgagcgataagctcacgcgagtcaaagcatttttacaaggatttttgttttaatcgaggcgtgcatgcgagcgagcgaaggagcatacatcagtatgtgactgagtgagagagcataagcagcgcagagtaaaacgaaaagccgcagtaaaaaaaggggtcgtagcgatctattccggcaatggcatcgataacgcggtgggcgccaacggcgaacgttacgccgacatgccgaacgccttcgcctatcgcaaggcgctgaaggcggactgcacctgcaacggccgcgaccccgccggcctggcgccggtcgacctgtcgctcgacacgacgctgcgtcccggcgacgtggttgcaaccgcaaatggactggtggcttattcgggcgtgcgcgtcggcaacgcccagaccgccgaattcacgccggtcgccaattatcccggcctcaccgccgatgtgcgcgcaaaactcggcgagatgaaggtgacgccggtgagcgccgatatcccggatgacagcgggatggataccaccggctcgctgccgctctcttatgcgccgagaccggattgttatggaataaacggtggcagttggcctgttttattctgcacgacaccgccgttggtcggctgtgttctgcacgattcaaacgccaaatcgactgcggtaatcactcggcgccagccccgtgatcttcttgaaggtcgcgcggaaagcactggggtcctgatagcccacggtccaggcgatatggtcgatggtgccgttggtgaattcgagcatctgccgggcctttcctaccctcaagtgctggcagtattcggtcggtttcaaacccgtggcattacggaagcgtcgtaggaaggtgcgctcttccaatcctgcctcctgggccatcgcggtgaccgaaacatccaccgcgccgctggcctgtagccagtgctgaaccttgagaatcgcggcgtctccatgccgcatggtctgctgcgagatgctcatgcggcccgaacgattgctgagaatggcggccatcggcgcgagcagcgtcggcctgcggtcggccacaaggccgggatcggaaatgcggaaatgattgatccacgacacctccggatacagccgcagcacctgtcggaacgacagcacgatgccgatcaggagcaccgcgccgatcagcgcgttgaggcccggattggcgaggaaggccgcccagatttgcttgtagagaacgacgaagatcaggccgcacaggatcagaaacaccagcatccgcaccagaaagatccggggcgaggacaactgggtggcttcgatgtcggccgcagagggtgaaggagctttcgccaaacggtttgccatatcggatcgtcaatcccacaccgccctgcgtaacggccaagtgtttgccggtttggtctacaccactgacggtcgtctgaatgccttcaagttaaagctgctggaagacgacaagcactacttcccggactacaccgcagcgcccgtagtgcgtcaggtttatctcgacgcccacccgcaattggccgacgacctcaagccgctcgccgccctgttcgacgacgaaaccatgcgccagctgaacgcgcgggtcgacgtcgaccatgaaagcccttccgctgttgccgccgacttcctgcgccaacatccgatcaaccaataagaggagaagacatggaattcttgaacgccttttcccatcttgattgggcccaagtcctgcacctgaccgggcagcacatcaccctggtcggcatcgccgcatagagacttttcctcgaactattcaccttaaggctagagtgcctggtgcttgactgcgggctgagcagctttcaatttttcgatgccactgaacatacctgagatcatccaagttatcagtaccgcaaaaatgaggactagcaatgctcctttgaattgaatagtcatttgatgttcctacctattccagcgcgctacggccggttcggtcggcaaactcgttacggacggcctgcaacgcggccacatgtttttccagtgcctccagggaagcgtgcggcgagcttgttgccagcttgcgaatcagcgagcttgctttagctgaactgtccaatgcccgctgcagcaggtcatcaatttcgcgattcataagcttttccttcaatcgggcaggtaatgcctgttgaaaaccctggaagagccgccgccctacgtcaaattcatcctggccaccaccgacccgcagaaacttcctgcaaccattctgtcgcggtgcctgcagttctccctgaaaaacatgacccctgagcgggtggtcgagcatttgacccacgtgctgggcgtcgagaacgtaccgttcgaagacgacgcgctgtggctgcttggccgcgccgccgatggctcgatgcgtgacgccatgagcctcaccgaccaggccatcgcctttggtgaaggcaaggtcatggccgccgatgtgcgcgccatgctcggcaccctggaccatggccaggtattcgacgtgctgcacgccttgatcgaaggtgacgccaaggcattgctcgaagccgtgcgtcacctgtcggagcatctggaacgacgaccgcgcgcggatcgagatgcacctggaggcgacgcgcgacgtgtcgttcacggtcgaggggcgcgggttcgagattgcggcgggcgagacgatccacaccgagaacagccacaaatacggcccgcccgacgcgcgcattctgctgcgcagcggcgggtggacgccgatccgcgagtggaccgacgacgagggcaagttcgcggtgatcctggccgaagcgcaggcggagcggcccgcaccctagccgcgatctaggcgcgtcagggccgctcgacgcgcgcggtccaggtgcggatgagattgggattgccgcggcactcgctcatctcggtctgttcgatcaggcgcagccgggtgccgtcccaggcgaagcgttgcgagacgccgcaagttctacacaggtcggctcctcaagcttgtaacccattggacacatcgtctttctttggagccctgccatgtcactcaaacctcttttgttgattccagcccttggtgctgtgctgttgttgtcggcgtgtgccggcccgattcccaaagccgacccgagcgaagcctggatcggcttgaaggaagaagcgccgaacgatctgatggctgaacgcgtagacggcaagcgcgtggatgacgggcgcttttttgaagtgaccccgggggaccatcgcctggacgtgacgttgttcgaagaggagccaggcgacgacaaccagcaggactgccagggccgagtggagtacaaggatttcaaggcgggtgagcattacaccctggtggaatcaagcctgggcaccacttgtaccagaaaagacacttgcttgctgtcgatccagactgggcagcccttaaaactgccttcctgatctaaaatgaagctgtccaaagtgcgggaaatgttccaacttttgtttgcactgtcaaaagtagcaatgtctatgcgcgttctggaaatgcatacaagggtaagtaaaccttgcgcaattcctaaccatttgtcctgaccagttaaaattttaccataattgagatcaagaaactcaggacggtcaattagtgtagcctcttctctcttcgtatcaaaagccagaacactaccatctattctgagccaatacagagaatcgccccaataaacatgtggaccacaaacaagtgaagataggaaagaaatggtcctcacttggatttcacgccacacggtgttgcactgccccttcaatttccagccctattcccggtatgccagatggcaagcccgccaatacgccctgcattcagcttgatgaacagcaacgctgtaaaattttcacctcgccactgcgaccgaaagtctgtgcaggcttacaagccagcgctgaaatgtgcggtaactcgcgtcagcaggccatgacctggcttatcgatctggaaatgctgaccgcgccttaaacatctttaatccgcagtaagcaaaacagagtggcgataatcatcaccatcgcaaaccagaacacagcgtgataattccagatctcggcgacgatgcccgccactgatcctgcgatgatccagcccacgagacactcgctaatctcgtatgccgtcttctgcttgaaaaaaaaagattggttagttcactgttatcaggtttaggataggagtgcatattagatgggatattctttgatgacccaagttgatatagaattgggtctcacactttagggtaaattaaagatttgtgctaaataatggatttgttacttagattcatggctggtaagggagtttgtggaatgcatcgcctatgaaagacgttatgagttttgggaaggagggaaagctaagtccaaggttcattgtcttagttgtgggcatgtaagtttctagctaggtgattcgattttgcttctaggtttggcaattatacatctagagtttcaggttctaatgttgaaagaagattattctaacatggatgaggccatttgggaggttgagacagtcatttagagtaaatatcctcgtccgacccagcgccgatccacgcgtttggaaatggcacaggtgatttcgtaactgattgtcccgaggagctcggccatatcatcagcggtcagaacttcatccccttgggttccaatgagtactacctcatcccccaccgtgacgctcgaatcggggccaagatcgaccatgaattggtccatgcagatccgaccgacgatgggatgaaccgatcctccaatgaggacgtgccctttattcgacagccctcgggacaatccgtcggcgtaaccgacggggacggtggcgatttttgtcgtttcactagcggtccatgtcctgccgtagccgatggcatcccccggattgatagttttaacgaaggtgacgtgactgatccatgacagggcagggtgtaggtctcatagattagctgggcttactctgagcctagggatcagcccaaggtgaaaacttaaagtcttctcagttcttttctgagtatacatcttgtgtagtcctggctggtgctttctcagttacactgtatatacacacagctgcttttttttcttcttttttttcgacagggtctggctctgttgcccaggctggagttcagtgatgccatcatagctcatggcaacctccccttcctggtctcaagccattctcccacctcagcctcccaagtggctgggactacaggcacacaccacacctggctacttttcatatttttttgtagaggtggcatttcaccatgctgcccaggccagtttcaaacttctgagctcaagtgatctgcttgcctcagcctttcaataccacctattcaacatcttcatttagatggctaacaggcatctgaaatttgacacatatgtattcatatctatatatccatttctctgtctgtccatctatttatacacatgtgtgatcttccacccttaatctgttccttttcatatttctatcacagtaaatgccaaccctatccttccagtggcttagggcaaaggccaaagtaaccttcatttcattcatttctctcacacttcaaatccaacccaacaacaaatcttgatcaattgcccttgaaagtctatctagaaacctattacattttgcccctccaccactaccacccttgtccaagccactaatctgcttacccagattagcctaacacaactccctgtctttgactttactcccctatatgttttgggcatggctgatactgcttggcgtatttattgtagatgctacgtttacgttgctacgccgtctgatacgaggtgacaaagtttacgaagcgcaccgcagccatgcctatcagtttgcgtcgcgccaatttggcaagcatttgcctatcacgctggctgtaggaataatcaacgtcttctggctgttacccgctgcactgtgtctgatgttttacgatttggacggtgccacggtattagcagtggcttatgcgcccttgataatgttggccattaagtttcgtgcgggtgaattggagcacagtgctgcctgaggggtactgctgcagtgttacttggtgtaagcgcgaaaagtcacactgctgttatatttaatattctgcaatgaacgcattttggcgtagacacggacaaggccaatctcaacgcaagcgtcgagccatttgactatgttggcgtctctgaccttttcgatctggagcggataaagtgctgcacggagcagcttgggatttgctgtgtatcgcccgaagtcatcaacaacggacattaagcgtcggtaaaatacctccgcgtcccaatcgagcaaattgacacgttcgctcgtaaggattccttctcggaggatgcgatttggcatagaaattcctcctacgcgttttcagtggcacagaccaatttcatgctgaccgcccagttaaaagcttcttcagcagatcgttctcgcgctcgagctcgtttgttttttcgcgctcaaggcgtagccggcgctccatttccgtttcaagcggtgtcagctacgcaggatcgcctcgatcatcggacgttcgactgcggcgaccaggcgggcgtgcagcgtgccgtcgtcgagcgtgcgcggctcggtacgcgcgagatgctcgatcaagccgtacaccgcttcatccaggcctgtcgccatcgtcatcggcagcgcgggtgccgcgccgcgcaacgccccacctacatctacggcggtgatctgatcgtctcgcgacaaggcagccaggcgccgcatgaggttttcaagctcgcgcacgttgccgggccagtcatacgcctccagcaccgcaaccgcgccggcatccagcgtcttgcgcggcaatcctgcctcggccgcgcggtcaagaaaatggcgagccagttcggccacgtcgtcgcgtcgctctcgcaacgcaggcaacctacgggcgggacatcctgccgcacgccaggctgctgaccctcaaccgctatcgcctgccagtgatgctctggcgtcatcgcaacgacgatgccctcgatgagttgctcaaccccttgcgcaaagtgctggcaaaagacggcaacggccaactgctggctacgttgcgcagttggtgcgagcacgacgggcaaagccaggcgtgtgccgacgcgctgggcattcaccgcaacagcctgcgctatcgcatggagcgcattgctgaactcagtggtgtcgacccgctgaggctggacggcatgctcgcgctgtatctcggtgtgcagctattgccccaggctttgtcggaatgaacaacaaacctttcccgcacttgtgcatcggaccggcgtcaatgtcggtgctaagaaaaagttgtacgttgtgctgcatccttttttatgtcgtcctcacatgtggtttgcttgagaattcatccgcttggatgctctcgacaaagactgagataaaactcattagcatagaaatgtaatcctaaatggggagatagtgtcttttaccatgttgacttggacatttgatgtcagcttcctctattctgacgtaaagcaaataaggctcgtattttgtatttgtaatataatcttcaacgtactcttcttttgatgacgaagtaataaaataggcagatgtaatatgttgatagttctcttgatatcgttgttgatggttctcttgatgttgttcttgccataaaaatgatgcaaccgatgttgattttctcgcgatgcatggtttcttttggtagaacgtcagcggccggccgatgatatcgacgatgcgctggcgcgggttcaaggcggtatcggggatctggtagatcatctgcacacgccgcaactgctccttgctgcgccgccgaaaatccaccggcagtgcctcaccgtcgtacagcacctgccctgccgtggcgggcagcagcccggtaatcagccgcgccgttgagcttttaccgctgccagactcaccgatcaccgccagggtctggccgcgatacagcttcatcgagacgtcgtgcaggaccggttgatgcccgtaactggcactgacttggcgtacctccagcagcggtacttcctggaccggacacgccttgggctcggtgcgaaaactgcgcaccgcccacagggatttggtgtagtccatgagtacacggcttgcattgtacccatgtcaagtcactcccagtgtcaagacttgcataggttttcattgggggcataccgatgaaaattttcattaaataatctccgggctcaggaatgatgtctgattgaatagtatgattgacaagtgtggtgggatggatggaagctttcgtgaagaaagatactcgggagaaagatctttggaatgcatctcggaggcgttgagaaggggtgatggaagggctatagtatggagaaagaggagaatcccgatagataagatcaagagtgaatccatctaaaccatggttggttttggcctttctacatgaaactaaagcaagttgagagaaagccaagaaggctaaaatagataaaaggaaaaaaactttagaatcacacagacacacacacacacacacacacacacacacacacatattaatttgatgttatggaggctcagaagtcccaccatcttctgtctgcaagctggagaaccaggaaagccagtgatataattcagtctcagtcagaaggcttgagaagcaagagaacccacagtataagttgcaatccaatgcaaaggtccagaacttgggaggctgatagtgtaagtcctggtctatccaaagacctaagaacttacagtgctgatgtctgagggcaggagaagatggatgtccctgctcaaatagagatagcaaattcacccttcctctaccttcttgttctgtttgggccctggacagattggatggtgcccacccacattggtgaaggcaattttctttattgcaccagttcgtgggcttgtgcaaccaggctgaaatccaggcccatttgcgtcgtcatagggaatcctgtttttggccgatcaaggtcaacacggcatccgccgcctggttggacgcatcccgacgcaaaatgcgatggatagcgtcaaaaccacgggtctgctcttcgccaccatcgatcaggggaagtacggtttgcgccaaggcctcaggcgttgcgtcgtcctgtaacaactccggcaccaacaggcgttgagccagcaaattgggcaaggagatgtaggggctcttgaccatgcgtttgagaatccagaaggtcagcggtgccaagcggtaggccacgaccatcgggcgcttgtacaacaaggcctccagggtcgcggtgcccgaggcaatcagcacctactgccctgctgctgccctgtctgtctctcttccactgcctgttacggctgcatggctatcggccccacctaccgcacgacttactcgagcgctcccttccctactctcttaccaacgagcttaattcctttgtctcgatgcccgagattgcgaggccgtccatacaaaaccgtcgctattcctccgtccgtcccactgttccacctcaccttttcctttccagaccagaccggaggggaagcgcgtgtaaaggatgcgataggagagcacaagcatagcatacaacacaaaagacacacagggacaccgacagagaaggacagacagagaaaggacagattacaacgacgatttcaacataacgacgacgatgattcaacaaaacaacaatacaatcagaagtacctcgacggctgcgccaaccactggatgccgcaagaggtcaacatgaccgccgacatcgccctgtggaaaacccggaaggcctgaccgacgacgagcgccgcatcgtcatgcgcaacctgggtttcttctccactgctgactcgttggtagcgaacaacctggtgctggccgtgtaccgcctgatcaccaacccggagtgccgccagtacatcctgcgccaggccttcgaagaagcgatccacacccacgcctaccagtactgcatcgaatcgctggccatggatgaaggcgagatcttcaacatgtaccacgagattccatcggtcgccaaaaaggcggcttggggtctgaagtacacccgttcgatctccgatccgaagttcgaaaccggcaccggaaggcccaaccccgaactctggctcgcccggcccggcgccgttccggtccgtttccggttcaccgacgcgctccggcccgacgcggccgccgtcgtggcggcgcttctcgccagaggcaagcgagtcgtgctgctgtcgggcgatcgctgggccgcggtctccgatgtcgcggtccgcctcggcatcggagagtggcgcgccgagcagagcccggccgacaaggccgcctgcctggaggaactggcgcggagcggagcgaccgtgctgatggtcggcgacggcctcaacgacgcgccggcgctttcggcagcccacgtttccctgtcgccctccacggcggtcgacgtcagccagaccgccgccgacatggtgttccagggtttgaagctttccccgactttttcacatacaccgggagaaagggttacgctagcaagcccctccccggccggagagcccccaggacaaggaggcggcgatcaaccatccactctcgagattcatattgatcaatagatctccgcgtcctgccagttcgctaagtagactcactctaccgaggggcaacaaaggctggaactcttcctgccaaaaacaagggacctacttctcatcctaggagttagcaggtatgaaagagtcccctctctgtctgtctctccgagtttctactactaagtagcacttctgctattcaatcatagaatcgattccgatcaagctgaaaaaagtaagccctatatatgtttgttattagtaaagcgctaaggccctatctatagtaaggggccctttctcataggtacatcgcttaggaacaagtacgaaaaggtggggaacgaatggggagaactggcgtccccagcgctctgagaggcgcggggcgctagcccttaatattcagagaccagtatggggagcgctggctggcacggcaccccaagggtgaacatttagagacccttttggggcgcgctggctggcgcgacgccccacccctatacccaggtgtttgacgactttgcttttctgtttttcatttctaaaccctctaaactctaatggttctttccccaaacacttaggatcattagtaccctcaatacccaatagatttaacttcgaaaaacaacccgaaaacacgaatcaaatcaacactaggcattcaacaatcaaccaacaagaattcaacaatgttcatgaagcccggcgacaccgtcgaggtcgagatttcgggcgtcggcctgctgcgcaatccggtgatcgcggaagccgggtaagccgcacctgccctcgaggccgccacgtggtgcactgggcagggtgacggccgatcttcaagacagccgcatcaggcggctgtcgacggcacaggccggaagcgatgcaggatggcgatggcgtcggcatcgtcgagctggcgaaagtcgcggtagaacgaccccaccgcgccgaaatcgcccggcgtcgtcaggctgaccagcgcgtcggccatctgccgcaggcttcccgccgcctccggagacatcaccggtgccgccacgacgacctgccgcgggcgctggcggcgtaccgcttcgaccgcgaccatcatggtcctccgccctccggcgacacgtcgcagacgcgatgaccgcgctgcggggacagcgcgccttcgtctacgctctcgcccgagaaggcgcgcccacgtgggtcctgggcgctgcgagcctcgtgggcatgaagcgggtcgcctcgcccgaggtgcccctggatgcggtcgtgcgcgaggcgatcgaacgtcgcggaggcgtcgcgatcggcgaggactatcggatcgttcggtggacggaacggcggccggtcgccctcgacgaggtggaagcggtgtcgaccctcatccactacctcatcccgattcccggctcccgccgcaccgcggccgttcagtggacggtcacggtggcccacggtgccgatgtggcggccgacagccccctgatccagtcctggatagatgccgccgaccgtgatcgaggatatcatgtcggcgttctacgacggcaagtacgacattctgctgtcgacgacgattgtcgaatccggtctcgatattcccgccgcgaatactctgatcgtgcatcgcgccgatatgtttggtctggcgcaactctatcagttacggggacgcgtcggccgctcaaagctgcgcgcctacgcgttgtttacgcttccggcgcagaagaagatcactgcacaggccgagcgccgcctgaaggttcttcaatcactggaaaatctcggcgcgggatttcagttggcgtcgcacgatctggatattcgcggttccggcaatctgctcggcgaggaacagtccggccacatcaaggaagtcggtttcgagctttatcagtccaagtggcgtggtgactggggttttctggttaacggggtgaaggtgccttggcgcacttacaccggcgccgatggctgtaaatagaacgctggttgacatgccttaatttaaacgctcagtgcgcaagccttaagctgatcaatttgccattgcatctgagtcaacaagccctctaaggggctgtactctagaactttgacagcaagccctggatcccagccctctaaagcaaactcttggcatatttgaacaatcgcccttgctgccagaacacactcaaccacttctgtagtaggcatcgacatgaggtcaattgtttgcaggtctcgcaaaacgctttcaaccttctgtaaagcgttcttcacctctgcaggtgagtctggtgtcacgggcctaaagctatggggtcgtcccgttaccatgttgcaaggtaacgaagaatttgtgagctccgatttgacggggaaagacatcggctatcgtaaaagcagcctggtggataactacattcattcagtgcttaaaactgaagaacagatgaaccgcatgtgggtggataaccgtttgaccaccgcgtgtcgtaacggcgacatgctgatctatgatgagttcaatcgttccaaagcagaaaccaataatgtgctgttatccgtattatccgaagggattttaaaccttcctggtttacgtggtgtaggggaagggtatctcgatgtacacccagaatttcgcgctatttttacctccaatccagaagagtatgccggtacgcataagacccaggacgctctgatggattcgttgtgcaaccggctggtgaaaatcgtaagtttgtgctcgcggctgaattgttggacgaaaatgccaaacgatttggttgggaagatgttcaagtgcttaaaacggtcaagggtgcggaactcgaaaacattttgtgcgaacatccttttgacaacagtcggcatttagtaacgatgttaggtgattttgtcacacttgattctgggactgggctagtgcatactgcgcctggttatggggaagatgactaccggatcggtaagcaatacgacctgccaatctttgctcccgtagatgacaaagggttcttaacggctgaagctggtgatgattttgcgggggtcttctacgatgacgctaacaagatcgcactggacaagttgaaggccgctgggtccccttgcctgcggcgtcaccagccacggcattcttagggacccgacgcagtaacgcgaagatgaggggtacgagaacgagagtgtaggcgatcgcgaatccgcgcatcaccgtcgtcgtatgaccagaccaaagcgccaatgcaccaatcaccacgacattcatgagaaactcgacaccgcggcgaattgactccagcagacccattgccaaaccccgacccttcttgtccgtatcttgggacatgaaggcgacgccattgaccacagctggccacccgatagcgtcccacacaccccacgacgccgcgatgacgatcatgacgtcgaaggacaagttggggatcgagaacagaatgagaccagtgacgagacgccacgcacaccacgagcacaaaatgatcaatgccctgttggtgtctcacacagactttgtttcagaggattaacttctcaaccgcctgctgcattttttatccagatatttaaaaaatcgtggaacggatcccaaaggtaaaccacataaaaaatacacgttcaacggagatcagcatatgaaactcgacgcacgcgagggcgggcaaatcttcagggatttaagcaaaaacaaccggcagttcgaacaactcggtcagggcatccctgatgaaataacctcgaaagagttttcatcactgctgggtgaacacttcaggctgaaacaaaacttgatgctacagacgactgccgccggagcggttctcggccaccgggccgagatgggaaaaatcattttcaatgggacctgagtgtttcagcgtttccgtacccaccgccaagcatggttagacttacttttattggcaacactcgctttcgccctgctgccagtggtcaacttgatgacaggtggtcaagctttgtggaacagcattgcgcaaggccagtggatgattgcatcggttgatttagccatgtgggtaatggcagtgatcttctatttcgcttatgacaaagtgaaaaaacatcaaggtttgccgaataaaaaagtgaaagcaccccttcaggaggccgaagcatgatttggtttctgatcatttggactttagcaactttaggtttttttgcacttgccagcagtatgtctaaacatcaaaagcaaatctttagcaaagaactgacacttcagcaaacacgcttagcaaccactgtgggttggggacagccactgaggcataaccgtaacgagacggtactcgtgcacacccgtcgtcacgccaaagccctcttctggcccgtcgtcatggggtttgttggggttgtcggagcggccgctctgcttggaatcatgccttccgacatgcgagcacagtattggccgatcgttgtcactatcgtagtcgcactcattatcgtcggcaccctctccccctggctgacatggttcacgacaacaatgacgatcaccgatcgccgcgtcatgttacgccatggcgttgtcgttcgacgcggccacgatgtcatgattgacagcctcattgatgtgtcatggcaggccacgttgtttgaccggatgatgggctgcggaacactcatcctcactaccccgtccgaccagctaactaccttggaaggcacactattatgcaagtccaagctattcttggaagggtacaagtgttccatcctagctaccatgaaaaagtcttagcccaactaagtcatgctacccttataagcacactaagatgttaatgtaaactacccataagagagtatgattcctcaatcctaagctacccttaggagagtataagtcctcaatcctaagctaccatgaaatggttttggccaaacgaagtcatgctatcatgaaggcatattaaaaatgctagttcaagctacccttaggagagtatatatcctcaatcctaggctaccatgactatccctaactcaagctaccatgaaatacatcttacaatgataagtcaagctactattaggagagtatagaccctgctggccctcggcgcagcctccggcggcgccctggcgcaatccagcgtgaccatctatggcgtggccgatgccggcctggtgctcgacaaggatgcggcgggcgaccgcctcaaccgcgtcgcctcgggcgtcgcctccggctcgcgcatcggcttcaagggcaaggaagacctgggcggcggcctgtccgccaacttcgtgctggaaagcggtttcaatatcgataccggcacgtcgggccagggcggcctgctgttcggccgccaagcctacgtgggcctgtccggcagcgccggcgccgtcaccctgggccgccagtactcgccctactatttggccctgcgcgacgtggccgaccccttcgtcatcggcctggccggcacggcctcgaaccaaataggtccacaccagtttcttgtcgggctccaggcccggcagcacgcgcggccgcgcacctgtggcgacgatgatatgcttggcgctgtagctgccctcgccctgcgcgcccttcggcgcttcggcggccgacttcttcaccgtgaacttgccgccgccgtccagtgacgcctcgccccagatgatggtgatcttgtttttcttcatcaggaattcgacgccgccgttgaggcgcttcaccaccgcgcgcgaacgcgcgatcacggctttcggatcgaacgacacgttgtccgccgagaggccgtagtccttggcgtgttggaagtagtgatagatttccgccgagcgaagcagcgccttggtcggaatgcaaccccagttgttgcagatgcccccgcgatagccctataaattacgtaaagtagcaaaaacaaccaacaatggcagtcacgtgcaagaaagtaaaaattctagtttacttttgactgcaactgatgtgaacagggttttgatatattctaatgattttacccaacggccgttacttgcgtagattacatgatgaccttggacaattgaagtgtaacaaacaattaatttctctgtctactactaactagcctattcatcactactatgcccaccaaaacgtgtcacttgtttctaatatgctctaacccatacttttgtacatgtttatccaaatattatcatgatcatctctaatcgtaagtagaaaatagcaagacttttttttatcagactagaacggcggagacaggttacatttacagggcagagcctcgcgatctcgcgcgcggtctccgccgccgtcgtcgaggtggtccgccggatcctcgagtccgcaccgccccggttcgtgatcgccaaaggcgggatcacctcgtccgacgtcgccgtccacgggttgtccatccgccgcgccatggttcgggggcccatgctgcccggcatcgtgtccctctgggaacccacggacggtccggcgcgcggcatcccgtacgtggtgttcgcagggaatgtcggctccgattcctcgctcaccgacgtcgtccgcacactcgcggagcacgcaggtgccggtgccggtgctggagatccacctgcgccgccgagtccggcgcacccgactgcaccctccgaccccctgaagaaggacacaccatgacctcagacaaacctcatgaaccaaacttcagaatttctctggtacatcccgaacgatttgaaatccggccatcgcggcgacgtggttgtcgaaaatcacaacagcctggcggttctgaccgcgcaggcgaaagcgatcgaacggcatggctggacgggcgcgctgatcggcaccggctggggcagacccgacacgttcaccatcggcacagcgctggccgcgcagaccacaaccttcgcgccgctgatcgcgatccgccccggctattggcagccggctcaattcgcttccgccgctgcgacgctcgaccagttgagcggcggacgggtgcgcatcaacatcgtgtccggcaaagacaaccttgccgcctatggcgacaaggaaggcgatccggcgcaccgttcatagagcaggttggaatcactccttctgtagtatctggaagtggacatttcaagcgctttcaggcctatggtgagaaaggagatatcttcccataacaactagacacaagcattctcagaatcttgtttgtgatgtgtgccctctactgacagagttgaacctttcttttcatagagcagttttgaaacactctttttgtagaatctgcaagaggatatttgcatagctttgaggatttcgtgggaaatgggagtatcttcacataaaaactagacagaagcattctcagaaacttctttgagatgtttgcattcaactcgcagagttgaacattccctttcatagagcaggtttgaaacactctttttgtagtatctggaagtggacatttggagttgtgagacttagacttttgctgtctttttaaatgaagttttggattatttggatttaaataagtttttaattccgcactatttctatgtcaaatgcaatgaaatgctatgaggcttgtatgagaccccttgggggtcaagtatgccatgtcgcacctaggggcaatcgttgggtcgggacaaccatggtatcagagcataagattttagaaatggtttttaggattgatgtgtcaaaacccatgtttagtagagtcttgttcatcggtgtgagttgcgacacatctatgagtgagaggctataggacgttaggaagttacacttttttcattattcttgaagtcatgccttatagtttagatctataagtgtccttttcctaacccttctcttgtgtgttcctgggtgatgttggccggggtcgcggtgatgatgacgtcagcaccgcgaccgttggtaagttccatgactttggcgacgacatcctcctgtgaaccgtcgatggtgatgtcgggcttgacggcagcggctgacaatgcgaggcgttcggcgttgatgtcaatcatgacgatagtgccgaccttgtgcacgccacgcgcgatacgggtgtgcatgcacccgatcgggccggcgccaaagatggcgaggaagtcacctttttcgatgccgagttgttcctgggcgttgatggcgcaggcgaaaggttcggcggcgctggcctcgtcgaaatcgacgtcgtcggggatgcgattgaggccgtctaccttgagtacttgcggcgggacgatcatatatctgcgggtgtgggtgacttccaggtgtttggtgcgcagtacgccatgcgtatctggctcgatccggccaagctgaacaagttccagctgaccccggtcgacgtcaagaccgccgtggccgcgcagaacgtgcaggtttcgtccggccagctcggcggcctgccagccctgcctggcacccagctgaacgcaaccatcatcggcaagacccgcctgcaaaccgccgagcagttcgagaagatcctgctcaaggtcaacaaggatggctcccaggtacgactgggtgacgtcgcgcaagtgggcctgggcggtgaaaactacgcggtcagcgcccagttcaacggcaagccggcttccggcctggccgtaaaactggctaccggcgccaacgcgctggacatggagccttcattgacaataacaaatcatgcaagtcttgaagtttgatgccggattcttcaatattgttcgattgtccacattgggtattagcgtttttggttctcaacaaatccaacgcaacgtcaatcataatctccaacttttctgccttcttcgtgtctggaatacatcttttgttgtatggtttgatgaagttgttccaaggattgaattctacaaagtcttcgaaacatcctaactcaaggtttgaaaagcatctggcgtgtggaggacatggcacacactccggtttgagatttgtgtccaagtattcacccacaaagttaacccaaggattttcggaatgaggaaatgttgcacggttgatttcgtgcccacaatacccaataagaaaccatctatactgattatatgctcaaggtggtttcttaattcttttcaacttcttcctcatgaaatttttcattcactgctgctgctagttgattatatgtgtagaagtgttgagtaatgtctgatgtatgactcaatttcgaaaggtaatcaacagagaagctggcctctctatatgaatgtttacactggaaaaattcaaggctggttgtgatctgctgcagctctttgatgaagtgattaagttaccatggtgggatactgttagcggtgatccactttattaaaagttcagattccacctccaaaatgatcttcctgtatccatgttgcattcacctgttaactctatgtatggctgcttgtatctaagcctggtagttggaaccaatgccaagggatcctggatgacgacaatcggccgatagctcggctcgcggcgctggcgatcgacgatctcgcgcaccgacttttcgtcgacaccggtcaccgacgccagcacgcgcaccgtgcgatcgagatccttggtgtgttcgcgaacaatcgagatgttgaacgagttgcggttctgcaccagcaggcggccggtgcgatcgaagatgatgccgcggggcgcccgcaaggtcagcgtgcgctggtggttgttctccgccatctccttgaacttcgcgtgttgcaccacctggaagaaccagaagccgaatgcgagcaggccgaaggcagccgcggtcgacacccgtagcacggtgagccgggtggcaaggcggcggcgatcctcggcaatggccattctaggaggatttggttttttttttcaagcagaagacggcatacgagatccccgacaccgcaatggtcatactcaatcgatccggccaacggttacgccagacggcggcgataattcccgccgccataccaaatataaccgcccagaccatactggttatggtcagccacagcgttggcataaagcggctggcaatctcatcggcaaccggacgacgcgacaccatcgacaggccaaaatccccctgcacagcattgctgatatagtgccagaactggtgatacagcggctgatccaaccccagctgctgacgcaccagttctataacctgcgcatcagcttcgggcccggcaatcaatcgcgccggatcgccgggcagcatatggacaaataaaaacaccagcacaataccgtgaagacgcattaccggcaaagctgcacccatcattgaaaataaaggagcgataccatgagacggcccattttgatcacgtcattgatcctgagtttggttttgactgccggctgtggccatcggcgacaagaaattgatgcgcggcttagtggcgctgaagacatggcgacggctgcaagagtgcacgcagatgagtcatcagcgaaggccgataaggctttgcaggcggctctcgctgccaggaagtctgcggatgaagccaatgagcgtgcgcaactcatcctcaagaaggccggacgtgttaattagtcgcggcaggctttggccagtaggttttattgcctcgctcggactggcaggcacatgcctggtcgggtgcagccatacgcctacgtgttcgacggcagcaaacctgcgccctacatcgaaaccgacacgccgaacccactgggcgtctacggccaaagcaaactggcgggcgagcacgcgattgcggccgtcggcggccaatacctcattctgcgtaccagttgggtgtactccaaccacggcaagaacttccttctgaccatgcagcgcctgctgcaagagaaaccgcagatgcgcatcgtcgccgaccagatcggcgcgccaacctgggccggcagcattgccaacagcacgcgtgcgttgatcgagcgctggcaaacaggcgaaccgggggcatggggcatctatcacctgaccgccggaggcgaaacctcgtggttcggttttgcccaggccattggcgagcacctgcgtgaaccttaatgacaccgacataggaaacattgatactttaatgcgacatgagaatgataccgagtttcacgctactggtgatgaagcaattccgaagaaaattggagaatattggattaatgaccaaagaattaataatagtagtggcagtatcacccaaaagaaacacgatttaattttcctcatgcaaaatgacgcctggtactttagccgagtcaatgctatcgcacaaaaccgggataaaggctccagtttcaaggaggtgctgattactactttaatgacgcctttgacgagtaaagcattagtggacacgtcacaggcccctgctccgaaaagactgtttcgtggattaaacctgtcagaagattttaccaaaggattaatcgatcaagctaatgcgatatggagccagttagtcatcacggccaaaacttcccattttgaatgtcaaatgtgccccaaggcattaaaacccccaattttgccgattttcgtgtgctatagtccatggacttttcctttcttttctaccttttcatcatcactcttcacctacccatttttctttcagtcccctctttcatagccaccctcaacttatggattttccattagttgaggtacacaatacccgatgccgggtcagggccaagatttgaagttactttttacgttagccaccctcaacttaggcctttggcctaggtcgaagtgcatatgtccaaggagggaccagggccaacatagtagattatgggaaagtgagttcagggtttaagaagaaatggtttaatttgccgatgacgttcggcgttgacatcgttgtgcattcgacaacgaaatacctgaatggacattcggacagcatcggcggattcgtcgcgctccagaatgaagaagacgccgaatggatacggtttgtgcagaacggcatcggcgctattctttcgccattcgattcgtttctggttttgcgcggaacaaaaactctcgccgtcagaatggaagcgcacgataaaaacgggcgcgccgtcgccgcttttttagacgagcatccgaaggtcgaaaaggtttattatccgggcttgcaatcgcacgcgcagtttgaactcgccagccgtcagcaaaaaggtttcggcggaatggtggcgtttgaatgcggctcgctcgaaaaagcaaaaaaagttttggaggagtatgaccagaccgttgggacgctataaaattcgggtacaagcgggtgccagattaaattgcgaaatggacgtatgtgatcattttcgcgcagcgtacccacatggcgacctgcggcgctttggccggcggtgctggcgcccgatgccccggggatgatggccgggaaatctacttctacggcgtgagccgcctcggacgcgagcagggctgcggagtaaatatccgggctgacgccgccgaacaacgttccgtagcgagcaagcacgcgcgtcaccaacgcgcgggaaacgatgccacaataggcgcgcggcatgtcaaacacccctcgccctaactggacttgtgcattgatcagtgctgctcgtgtgtcgagtctcgccaccttacctgtgtaagttgcattgcgaaggaataagggcagaaaatatgttgtttttaaacctggtgactgggtttgggtgcatatgagaaaggaaagatttccttccaaaagaaagaccaaactagatcctagaggaagtaggccatacaaagtccttcaaatgattggagacaatgcttataaacttgatcttcctggtgagttccaagttagtgctacttttaatgtttctgatctttcccattttgatgcagatttgaattcgaggacgaattctcttcaagaagaggggaatgatagcatccaaggaagctctactccattgaaggacaaggatgaagctttagaaactccaaggaggcccataacaagatctcaaaccaaggagttcaatgataagctcaatgggagaagttccagatcggagccgatcatcgacagcttggccgcaagcgccggcaccccgtcgaccggaatcgacagcttgccggagaacccaacctgaccgccgaccatgccgccatcgagctgttcgaccgtgagttcgccgttttccagccgggcacgggcggcggtatcggtcagcctgtgatcgccgtaggcgatggcgcgggaggtcagggccagacgaccgtcgatgccgcgcatccaatccagccggaacggcgagtccgaccacagcaatccttccgccgcgagggccggctgaatcagcgacggcaccatcgttgcccgtgaagacgtctgaaggaagtgatcgatgacgatctcccccgtctggatgcgggcgtcgacgacgggacgcactgtggttgacagcagcatctatggtgcgttgttcaacgtatttggcgttgacgacgagccctcgggcgtggtctggcagtgcgggagcgggcagccggtggatcccggctccgtctacccggcacgggacctccacgacggcatcgtcgggtaggtcgggaagggctccatggttggcgacgttgaggatgagttcggcgggcacgtcgttggcgatggcgtgcatgattgccagggcaaccttgtcgtatccgccggtttccaaatcggcctcgtcgcgtgcgaacttacccgagacctcgcgattggtggccatgtaggtctcttcgcgttccaggcgggtagcttcccacagtccagcgacgtcgtcagtgtgttgggccgtggtgtagaagcttctatggcgagcgcgcagccagcggcgatgccaaggcacccaagtacgtcaagatcgacggcacccagccggtagatgtcgtacgcggcaatgtattgaaggcgctgggcgcctgagctgcagactgaatgcttgataacacaaagcgggctgcggcccgctttgttgttgctgtagcagtattttcgccttgcccatgcttgtattgcgataaatcgacgctatcttgctggtatacactggaactgtggtggcgttttgcttgcccaagcctgcccgggacggcagcttctgttttgccatacttcctgcggggcaagagaaagaggtgttatgtattacggtgagcgcttcaacggaatctcccatctggtggggaccgtgctggccattacctcgtctacatcgtcggcggaggcgtccggcccccgggcgttgatcgcatcgccgagctgtctggtgccgaaccggtcagtgggtttaacacctccatccccgacgaggagatgatggccgtcatcatcgactgcggggggaccctaaggtgcggaatctaccgtcgcaagagaatcccgactatcaacgtcatgccgcccggtaagagcggtccgctggcccaatacatcaacgagtcgatctacgtctccgccgtcgacgtcgaccaggtccggttggccgactcacctacatcctccgccactgtcacctcccccgctatagccgccgctgccgcgccacggtcaaaagccggaacagcaggcaccgtccagggggaatggagcactgacaagagatggaggtcggttccgggagagcaaagcgttccagcaaacgggcgttgttggcgcgcgaatggcgaatatcaccttggcgtggcgcttggtaggtcacgttcaacggggtgcccgtggcatcgcccagttcagcgataagatcgttgaggctggtggcgcggttaagcccgacgttgatggcccctagggccggctcgttggtctctaccgcctggacaagaatgctcaccaaatcttgcacatatacgaagtcgcgggtttgctcgccgtcaccaaatacggtgatgggcttacgggccagtgcgcgttcggtgaagatgctgatcacgccggagtaaggcgaggaagggtcttggcgtgggccaaaaatattgaagaagcggaagatcaccgggttcaggtccagcaaaatgatgacgtaatcataaagcttgccgagatcgacgccttcttcgccgaggtccgtcgtatagacgttgaaactctcggatttgagcatcagctcaatcgactgcgcggtggcgctgtcatcttctatcagcaatacgcgcatgccagtcccctaatagtcgccgctccgggcgtcaggccggccgcaaactcgcggcactggaacgcctttgaacaactgattcgaatcctgacgacatatggttaacaaatggtgattcgtgcctgcaagtactaatcgtgcaatttttgtcgaatcgcactaagatattgcagcgaagcagttttttgtaatccacgtccttcagtactcacattaagaggcgggcctaaccgactcgttccggagatgaacgtcaggatctggtcggtctccgggtggacctcgtcgccgatctctccgccgaccggaacagtcatgaccacgatctgtgcgtgctcacccgtccacagcaccttgcggaaatccgggttctcctgcgccacgtctgcaatggtgaagtgctggacgttgccgtcaatgctgaatgttttttcggtcatggtcttctccttctctttgatggggtcttgtcgtagtgccgatgaccggggcccaacggcgggactgagggtcccgccgtccggcggatcggtcaggtgttagtcttctcggtcgctgagtcagtgtcaacctgcgctgctcgcgatggggcgcgcagctccttggccatagcggtggcgtcctgggcgttgctccctgttatcatttttgtcgtgattttttcgggatcatagacatggaatgcgcgatggcgagcgaattcgacgccgcgccgcccacgcgatgatgcgcagatttgctaacccagtgcgcctaacgccgcgcggcgcgcaccagtgccgccgtcgccagcaagatcgcggcgaccatgaccccggtcgtgatgacgcccgccggcgtcgtgcgtccggcgcctttgagattgatagtcttgccgatgcgcagatcgaattcgccgcgcatttctgccggatgggcgaggggcggcgcgatggcgtcggtcatgatgaacttccctccgaagactagcgccagccgagcgcgggcgcgatgtgggtcaggatcgcctcgatcacatgagcgttgtagctctggtgtctagtgtttagcctcaaattgcagccttttcttttttgcactcttaatgaattaaaagagaagaatgcaaggtttacgaaaacacaaatccaaatcataccttctgatggcagaccagcagaggaacacaacatatagccccataaaacctggagtcaggaaaccggcattcacctggtgctttcatcaattaatataaattatcccaacaaaaaaatgtaaacacaagaaactcagactcactttggggtggagagaaacactggtcatgagttggaggagtactaatgtccaggagatgaagaaaatattaagaaggcacgatggttgaggcgtataccaaatgtacattaagatgatcccgaggatgcatataacatatgcaacagcttagcctgcgcgagtaactttataaattctcacgcgcaggctaagctggtggtaactcatcaacgaggtggatatgaacgtggatctcgcagcctgcaaacagctattcgcctacggcgcactgcgtggcgctgttgtgaccccatatccgatgacggacggtgcatggaacatcctgatcgagcgtcaggatcgaatcctggagccgctgaatggcttccggaaaaccgagcccaagatctacaaatcccttaatgccgcgctggcagacgctgcgcgcattggattcaaggaagtacgagtgcagatcaacaaggcagcataagacccagaaaccaaaaagccccgcttgcaggcggggctttttgggaaatccattgaagggcctgatctcacctagtcagctcacagtcatttttcgttgcggtcgtcattgggctctgtccttgcattctcgaggtgcttcttcctccgttcgaggttggctcggctgaccgagaacgcaatgagtgcgagtaacgcgatcttcgctgtggtccatacccaatccggggtatcgaaaggcagatgaattgctggtatccacccgaagagaaagtcgaagatcgagccgaagaagcgaccgacggcagccagcgcggaaccgagaggttcaagcacccgtcctaaccaatggaacattgggtcgagcaacggcgcgaggtgccgagaaagccaagtcttgactgggtcggcgagaaaagcgagcagtcctccgatccccaggagtggaatgactaatcgcagggcgaacctatctcggtcattgaagagagtgctattgcttcatccaatttgaaggaggccgaggaacctacctcggtcattgaagagagagctatacatagtgatgatgccgaaaaactcaataaggtggttgttgaacaaccgtcagaatctttgttggctgaaacagatggtgagaaatttacttccgaaggagatgcagttgtggatgccattgaagtcaatgtctcagggccaggggttgctgttgttggagatgtggaagagagcaaggaagtggaagaacatattgaaggtactactgatgagaatgtgacatcagtaaatgatgttggtgagaccagacaacttattgaagaagtggttaatatgacagttgatgaagtagatgcacaagacctctggaaccaccaggtcaggcgtaaaagagctaaaagccacctttgaaggtgaggttccttttgatacggtaaagcctacagagctaataaagcgaatgatgaaagtatctggcgttaacgcaggagatattgttctcgattttttcgcgggctctggaactaccggcgcagctgtttttgataccgaacagtctaggttcatattggtgcagttaccagaagaaatcgatgagagcaaacctcatggtattactgccagaaagcttagtctgtcaaaaatttcggatgtcacaaaagagagactaaagcgctgttcggttaataagtctccctctaatgcaggatttaaagttttcaaactttcaagctccaacatccgtgcatggaatccggagagctgaaccgcactttgcgaagaatgaacaatccaagagatccaattgatcctatcggaggaaatctagatgaagtagttgagttacaacaacagagggtaattggtggggacaaccaggttccagctgaaaatcgattgggagatgcagtgagggtgcatggcccaccaggcccacgacaacatgacaactatctgggcaacatcgatatagcagactctgatggacctattgtcctacctcttttacctccagggcacacttttgtggtgactagtagtttgatgcagatgcttacagcaagaggtttattttcaggatctccatcggaggatccacatgctcacttagccaatctaagggtggtgtgcaaaagttgtgtaggtagaccagacgcctatcaacgtggtggtctaccacggttctcaagggaatactcgttttgaggtgggtttcccgcttagatgctttcagcggttatcccgtccgtacatagctatgctgcactgccgctggcgcgacaacagctccaccagaggtacgttcatcccggtcctctcgtactagggacaaatcctctcaatattccaacacccacggcagatagggaccgaactgtctcacgacgttctgaacccagctcacgtaccgctttaatgggcgaacagcccaacccttggaacatactacagccccaggtggcgaagagccgacatcgaggtgccaaaccttcccgtcgatgtgagctcttggggaagatcagcctgttatccctagagtaacttttatcctcagtgaccattaaacagctagattcccaacaaaaaccgaggatgcatactaagattgaacaattgtttccacttgatatgtgaaagggaacattacagtccattccaatttgaataattaaaatttatccctctggataatttcaaatttaaatgatcagccatacccatcagcacccaataactgtcctgccacacctacctatcagcatccaaaatctgtcctccacacctatcagcgtccaatatatgccctgccatactcgtcagcatccaatatatgccctaccatactcgtcagcatccaatatttgccctgccatgcccaaacatgacttcttaatcaccaaataaactgaaggaaaccatgcaagaagcagctagctttcagcaactgaccaggccgacccgtcggcgccgctgcgaccaggcgatcactccgacgcccccgacgaccggggcgacgacggcgaccgcgcgatcgtgcagccgcagctcggcgtcgtcggctggctgcgatggggctggcgacagctcacgagcatgcgcacggcgctcgtgctgctgctcctgctcgcgatcgcggcgatccccgggtcgatcgtgccgcagcgcggcgccgaccccaacggcgtgacgcagtggcgggccgataaccccgacctgtacccgatcctcgacgcgctgcagatgttcgacgtgtacacgtcggtgtggttctcggcgatctacatcctgctgttcgtctcactcatcggctgcgtcatcccgcgcacgaagcaccactggcagaatagttttctccctccagatctgcacgacgcaattccaattagtttaattacaacaagccccgacagcgattttaatctcccctcatccaattttgtcgatgccgccggtctaaaatatgagcaccttccaaattgggagttcttttcttatatccctggcgacagccaggcactttctgcaggagactctcgactgacgttcgaaaattctaaatatccgtcaatcaacctttaccgctgcgattcgaaatccaaaaaacttgaaaagagaacaaaagcagccgaaggaaactgcctcatcctatctgccccaatacatgggccactctacccagatgcattacctacactttcgcggcttgcacgaaatatcgaccgcattgccttcaacctacaatggaaggttttgagactagaaaggcgtttttcttaggttacatgatccatcgtatgcttttgtgtgcgttagagcgtcgtgaaccagatgatcgagatcatttcgggaaaaagcgtcttgaccttgcaggtccattacttgcatctctgttccgtatgctctttcgtaaaatgactcgcgatgtgtataagtatatgcagaaatgcgttgaaacaaatcgtgaattcaaccttaccctggctgtgaagtcaaacattattaccaatggtttacgttattcattggctactggtaattggggagaccaaaaacgcagtatggttaatcgggttggtgtatcacaagttcttaaccgatatacattcgcttcaactttatcacatttaagatcgttgatgtgggtacggtaggccgctggcgcttgctgcaacagttgtcgggtcagcaccgggtcgaggcgcgtggtgacggtgatcgcttcgcgcatcagcgcggccggtacgtcgcggcgccctggtaaatcactgtgcatcggctgcaaacgggcttgccagtactcgacttcctggctcagcccaccttcgcttgccagcgcgtgcaggcgttcgctccacgccttgaacgggctggtcttggccggcagccgcagcggctgaccgctgtgcaactgctcgtaggccaactgcaagtcttcaaacaggatgcgccacgacacgccatccaccaccaggtgatgcaccgcgagcagcaagcgttgcccaccctcgggcaaggtcagtaatacataacgatgcgtttgtttccaagattggatgaaaattttagtaaaaaacataaataacaatggatgacataccattaataaattagaaaattggccgacccttcgatgcagataaataaattgtgtagtatagctcaagtaaagtgctaccatttttcttacagacatttggcgatattttaaactaagacatagccctaaaatactcgctatagaaccaaacaaccacaacacaattgctgtcatgatcttaggctttgtgccacctgccccagttgacaaatgctttgtccatccttcttgtaatgactgaaatccttcttgatacatgcgaaatgcaacaaatggaaacccttcataaactgttacgggcaatgattgtgaagtatatgcacacgacacccaacacaaggacgaggaggccgcccgatgactacgggacttcccctgctcgccggtctcgtccctatggtgacggcatcccagtgggccttctggctgttggcaccgatcatggtgcttgcggcctaggtgatggtttttgccaagaagcctgtccactcggcgttgtcgctggccgtggtcatgatttgtctggccgtgcagtacgccagccaggaagcgcctttcctttttgtggtgcagatcatcgtctacaccggcgccatcctgatgctcttcctctttgtcgtcatgcttgtcggcgtcgactccaccgactccctcaaagagaccctcaagggtcacaaggtggccgccatgatcgccgccttggcctttgtggtgctgcgaacacaactgcgccatctgcggcagtcacgattcgttcctcgacgagctgattctggatgacgccggcacccagagttttgtgtgttccgacacctggtactgcgcccaacgggtgaaggagagcaaccaatgatccaggccttgatgaaacaaccaccgctgagcgtgcccgtcgagccgttgttgcaagtgcgtgacctgtcgctgctgtacggcccggaaaagggctgccagggcgtgagcttcgacctgtatcccggcgaagtgctggggattgtcggcgagtcgggctcgggcaaatccaccttgctctcgctgctcagcggtcgcctgccgccccaggccggcaacattggctatcgcggcaaggacggcgaatggctggacctgtacgccgtcagcgggttgagcgcgataaacaccccggcacgggtggcaccgatttgacgcaggccatcgtaatagccgatgtacgccagggccgaccctaaaaccccgagataaagcaggctgaagatttgcggcctatgaatgacttccaatcctgccatcgtgaatcgaccggtagcgagcgtggtaatcaccaacatcaacgtacccagcaagatcgaccacgtgaccgtctgcaatgaacccagacgttggttcagcctgcgtgaaaacagcgagtacacgccccaccccaccacacagccaaaaatcaacaggtcaccacgccaggcattggcggtgccttgcagcagttgcgggttacggctgacgataacggtcgccgcaccgcccaggcatcataaggccgggctgaatatctttcaatatccactccaatcggataggttttacccactgccaatatggccatttcaccagtatgactgatattaaattgcaatttttgcgaattaatcacattgggcttgccatgggcattgtaagtaaattccaatcgttcagggggcgtattaaggtatcgggccaggataattcttaaagttgctctggcgttggtaaagcgtcttttatggcgattaaaataaaagcgatcagcacgggagcgttcatcggcattcaataactgatacgcactatgcaattcatagtctaatgagaactgccaaagatcaatacgtgactcatttaaaatgcagttttgtgtgtttaatggagtaaatcctgtaattaggcaaggccactgccagctcatcgacatgggcaaaaccgttccagttggtgctgaccacgatatgccccaccggccgatcatccaggtaggccatgaaaatcgcactgtctggcgcatcgcgaaaactggcgaactcttcagggtcaatcccatagcacttgcggtacggcaggatgcgctccacaggccattgatcgacccgcttgcccatctgcggctcgccgtaggcgctgacctcaaagctgaagtcattgccccacacgtaggcatcaaagccctcgtcggcgacccgtacactgagccccggatacttcgggttcattacagcttgcataaccatccttaacccttgatgcaatcgacggtgtaacaacgaccactgccgtcatcttcatcacagtgggtacacgctcaatgcggtagtcgcagtagaactctgcctcttcctgccagtcccgagcacccggcgcaatcaccagcgcctcgtgcccctcacggcgtaagtgttccaacacccgcaacacggagtttgtcactccattgatgttgggcaagaagctttcagcaatgatggcaacgcgcatggtgctagttttccatctcgtcggaaagcgaaagtgaccctctgtttaccttttggggatctctttgtaaacgacgggttgcacgcaacgacaaccaccacaacggcgcgacgacgataaacgcaaccacagcgatgctggccgccgggagaagtgacagcgtccaagtgcgtccggcgacgcggacgacattggggtcagtgtaggtgtacagaatgttgtgggctagcacgtaggtaaaggtcacccacagcaccgggcgaatgccgggtaaggtcagcacctggcgcaaccccatgcgattttcggcgggctggccggcaaaatccgggagctgccaacgcgcccagaccagcagtatcagtgtcagcccggtcatgatcgcaaaactcaggcgccagccgacaacggtacccagcaaggtgccggctggcacgcccagggataaggccagtggtgcgccaagcatcgccacggcaatcgcacgaccttgcagatgtggtgcaaccatccggctggcataaccagccagcaacgcccacagcagcccggcgaataccccggcaaagaagcgtgccaccagcgtcagcccatagtatataagatagattcgatgtggtattgaagttatttttaatgattagggtctgtttacctttcgctaacttgagtcaaaatgacctgattttagagcaccggagcgcagaaaatcaggtcattttggccaagatagaagaaatgtaaacagactctagagatgtgttgccaaataaataggaagtgttatgcggctttggatcagaggatttacttgtttcagtttctatacattaatatcctgtactgtttctctacctcagcaaagccaaattaaaaatatcaaaactgttccacgcatggaacattccattaaaaaaagtttgcaaaaaaaagagattttttctaaaggcgaatggccaagcaaacaatggtggttatcttataacagcccctacgtgcgcatgccgtggaaaaacggcggtggcagcaccgaagagatcacccgtgacgctggtgcgggtctggatggctttggctggcgcctgtcgattgctgatatcgccgagtcgggtggcttctccacgttcgccggctaccagcgtgtgatcaccgtaatccaaggcgcgggcatggtattgaccgtcgatggcgaggaacagcgcgggttgttaccgctgcaagcgttcgcgttcaagggtgacagccaggtctcatgccgcctcatcaccgggccgatccgtgacttcaacctgatctattcgccagcgcggtatcacgcgcggttgcagtggattgatggcgaacagcgctttttcaccactgcgcagacggtgttggtgtttagggttggcgtggccgaccttgcgcccggccttgaaggccttgccgtagtggtgcaggtgacagtcgtcgatggcgatgactttttccaccgccggcacagtgccgatgaaattgagcatggcgctctcgccgaccttggccgtggaacccaatggcaagcccgcgaccgcccgcaggtggttttcgaactggctgcactcggcgccttcggtggtccagtgcccggaattgtgcacacgcggggcgatttcgttggccttgaggccaccgtcgacttcaaagaactcgaacgccatcacgccgacgtaatccagctgcttgagcacacggctggaatagtcctcggccaacgcctgcaacgggtggtcggtgctggccacagacagcttgaggagacaggcagcgcggatgaattggacattcatgagaccattaatcgcactgccaaaaaaggcgtgcttgatatccatatgcaagcggagcgtcgtaatcgcgttaaggtattgatgctatttgatgtgggcgggagtatggatatccatgttgaagcgcttgagaagctgttttctgcggcaaaaaacgagtttaaaaccctagagtttttttacttccacaactgtctgtatgattatgtgtggaaggacaacaatcgtcgtcatagtgcaccgatgccaacgtatgagctactcaataaatacggccgagagtatcgtgttatcttcgttggggatgcctcaatgtcgccttatgagctgatgacggtgggcggtagcgttgagtatatgaagctgggttcactcccgctgctcgcacctccacggtgacctcaccggacgccggcggcggcacgtcgtaggacgtgaagtcgaagacctccaggtccccgggccgtgttgcgagccagcgctgcgccatgaaagcgccaaccacacccacgggcccgccattcccgtgtcctgcccgccgggctgcccactcgcgccaaagcccagggatgagccgtcaatcgttaggcgcagtcgccacagatgtcggcggccggcgagggtcgtcgagattcgtgctgaacgaggaagcaggctgtgcaggtgaactcgtccgtctgcgatcacccgagcaaccggcatttggctgaagcgctcttgtaaccgtccgttgtactcaggccgtggatcgtgcgacatttacacaagcaattaacaatacccagtggctaaatcaacccataatcacataatcacaccccaagaattggggttttagatacacatcataaaaatagagaaacgattaccaaatacattagccatgatctgggtaaaagttctcaagtatttacaatggtccaaattgaataaattcaaaaacccacgtagaaatcctcaaagtcttcaatgaaaactcaaaaactaagagaaaactctaactctcaaacttgggaatcaaaaactgtgaaaggaactctgtgtaactgggtgagaactcctcaaatttcatttaaaatttcaattaatagttgcccaatttttagcttgaaaggccattgggcggaataagtcgggcctcgctgaacaagtggaactccatctcgatctccggctaccacatgcaagaagctggcgctaccgccgatatcgagatggcctacactctggccgacggcgttgattacattcgcgccggtgagtcggtgggcctacaggtcgaccagtttgcgccgcgtctttccttcttctgggccattggcaccaacttcttcatggaggtcgccaagatgcgtgcggcccgcatgctgtgggccaagctggtgcaccagttcaacccgaagaatccgaagtcgatgagcttacgcactcactcgcagacctctggctggtcgttgacagcccaggacgtttacaacaacgtgattcgtacttgtgtggaggccatgggagccactcagggacacactcagtccctgcacctctgtggatgactccttctgcatattttcagctctcatctccatgaactgcattccaagcttatttcctgcaaacatgatacaaatcacattatttctaatacaatatagccctagacacataaaactgctaagtgaaatacatcaaaaatactgtaaactcacggtatatcatcatcctgctaggaggaatgttgacgaacaaggggtacctaaagcacacgaagtgcaaccacaaggagagggcactaacactgaattttgggaagctatccgaaggctgagtcaagatgtgaccaattaagttgagcaacatagaggagttcgacaggaaggggatgatacttcaaggatccacgagttcttaaggatgaatcctccagacttcataggtcacaaactgtatggcccgacaggtatcggcgtgctgtatggtaaatcagaactgctggaggcgatgtcgccctggctgggcggcggcaaaatggttcacgaagtgagttttgacggcttcacgactcaatctgcgccgtggaaactggaagctggaacgccaaatgtcgctggtgtcataggattaagcgcggcgctggaatggctggcagattacgatatcaaccaggccgaaagctggagccgtagcttagcaacgctggcggaagatgcgctggcgaaacgtcccggctttcgttcattccgctgccaggattccagcctgctggcctttgattttgctggcgttcatcatagcgatatggtgacgctgctggcggagtacggtatcccttataacaaaataaattagatgtcccataacctactaaataatagataattgaatcctctttccaacgccaccaagtttgataaatttcgagttctgatgagggagatatgccaattcgaagtcagcctgtcaagttatgtaaagttacctggattaatgaggggtatttttgtcttttccttaacccatcagcttaaaacgtttttagtaatatttttggggtaaaatcttatttgggtcatttttcacaataccaaatatgcttggggttttgagaagagttcaagaggagaaaagaggaaaggttcaaagtgttcgtcatggttcttgagatttgttgaggaattttaccaaggttgatccctaagaggtatgtaagctctcataagtcgagggcatcgtccgcgacgtgaacttcggctggctgctgcgctatctgcactccaacggcgcgtcgatgttcttcatcgccgtctacatccacatgttccgcggcctgtattacgggtcctacaaggagccgcgcgaggttctctggattctcggcgtcatcatctatctgcttatgatggccaccggctttatgggttacgtgctgccatggggccagatgagcttctggggcgcgaccgtcatcaccaatctgttcggcgcgatcccgcttgtcggcgacagcatcgtcaccctgctctggggcggctattcggtcggcaacccgacgctgaaccgtttcttctcgctgcactacctgctgccgttcgtgatcgccggcgtcgtcggagttgtatgtggccctgttgtccttggcagagccgttcaagaaggctgcagactatgccgccggcctggccgccgccacgggggaactggcgcaagtgagcaagacggccagcgacatcgccagcgaacgcaaggatctgcagcagcagttgaacgagctgacgcaaagcgaaacgcagctgctcgccgcgcagcgcgccagcatcgcggaaggaaatcgtggcctgttcgaccagattcaggcactcaaggcggtgaccacggccaaggatgcgctggccaaggcgtatgaaacggaatcggcggcggccaagtcggcgctggacaagtcgaaatcgtgggtgcagaccttgaatggcctgaacgccagcttggcgctgggtgcccagtctctatataacttcgttgtctttatcgcagcgaaaatcaactacctcttgaatcaggatttgaaggtacaagatggaatgagcaaactgtttgtaatatggtcagtctcgactataagtctgctagaatgaatagaagaacatatctaactaatacgacattcttccagcactttgctggacatttctacaatttacaatcgacccagggccagtcatgaaaatcatccatataattaaagcacatgaaacaagatgaaacaagatgaaatatgaactttagtgtaattcgaaaggagttactgagtgttttttgaaaagaccctcagattcaagatatcaaattcaagatatcagattcaagatgtagcaaagagtatatgtgtataaggttgccgagcaccgcaccacgttcatcctgcaattcgaggctgctgaggtgggacaggatatcagacaggtcgagacttggagcgccgccattggcacgcgccacataaggcccgtcgaaaatccgattggccgaggcataacccaacgcgtcgagtacgctttgcagcacctccggatcggcttcgtgtcgttgcccgttgccgtcgatgaagatgggattgacgcctgatcttatggcctgctccagcaaatccatcaaactcaccaatcggagcaatctgacacactacgacttcaacccttaactttggcaacgacattctgttccagtggaaccaaacgtgctggttgttgcttatagaacgacaagcttcccgcatcgtccaaggcaccccaaccccatcggcacccgctcgatgccggcgcggctggcgattggtgtgtcggcgccgttcaaggcgcagtacccgcaactggtcagcgtgtttgaaaaagtcgacctgccgattgatctgctcaacggcatcctcggcgaaatgagcgagaaacgtacaccgccgcgccaggtcgctgaagcgttcctcaagagccatccagacatctggcaacagtgggtgccggccgatgtggcggccaagctgaagggagcgctctgatgcttaaaatcttcgctgctgcggtactttcgctggtcgccggtcaggtgctggcggccgaaccggctacgttacgcatcggttaccagaaaagttcggtgagcatggtattggcccgtgagcacccatgaacaaggcagaccggcgaggcgttcggtcacggcgaacccgggcgctgcgcaaactggacacgggctgcggaaccggcggaccagatcgagggtcgcgcgcttgatggcgcgcatgcgcgtcggattacgatgcgcgcgcatgtcggtctcgacaaaagcggcgccgcacatcccgatgaccttcgtcacggcgtattcgaggtcttccgtgttccggatatccttgatcagggcgcgggccggcgccggctggccgtcgatgacgcccatgacgatcacgccgtgctcagggaactgcgcgcgctccgcgaaagcgcgtgccgcacccacgtccgacacaaccgcatggctgaagttcgtggtcggactcgcatgatgcccgatctctccagctactacctgcccctgttctacatcgacctgatcggcgtgagcatccaggtcgtattcatggcattgctcaacgtgttcttctacctcgacaaacgccgcgtagtgctggaactgtgcgtactgttcgccgtactcaacggcgccctgacactgctcagcatgcacctggggccgagtttctttgggtatgggtttacgttgtcgctgctggtgtgtgtgttgctgggactggcgcggctgtcgtcgacgctggaagatttggagtatgagacgtttatgctggcgcggtgattggcgtttagcggcacgagaaaaggcacttggcggatagcggcaagtgccttttttgttgctgggggattggttattgcccggtatggcaaatattattatagtcctcaaaccaactatccaaattgtccatcaaagcaatagcattcattgggtcataaaaagctatatagtctcgcttaaatgttttaacaaatgcctcagccatgccattactctcggggctataagcgggcgttgtacacacttcaaagcctaattctcttgcaaaagtgattgtttcgcgggagacatagcaaggcccattatcgcttaaccattgaatagtcgcgggaagatggttaattttcccgaaacggtattcaacactttctagcatcaaatcacgaatggctgcaccatcaataccaatcgttgatgcgataaacccaagaatttctctgtcacaagtatccatagcaaatgcaatgaaaactctatcacggttgttgaatcccgcttcaagggatctgagaacgaaatcatgctcacggacgtcaactccttcatctttgactacaaggaccagatgctgcgcactgtccagggccagcagtccaccgcggatgtcaccaactatgagcaggcctatcccttcgcagtacgcgccgttattcgcggcgagtgggaatcgctcgatgcagctcaggctccgcaggacacactggcaccacagaagcgcaccaatgacgcctattcgaaccgcgccggctgggtatccaagtacctgtcgcgccacccgcagactggtgaatcccgtgaatcccagcgtgcgcactaccacgccaagattcgcccgacggacctgctggagcgctcccgtcagtggatcaacgacgatgccaattaacagtagctcggtaaaactcattccaaacatgcgtgaatcccggttggcctaaagaactgaaaccagttctttaggccaaccgggagtcacgcatgtttggaatgagttttaccgagctactgttaattggcatcgtcagtctggtggtgctcggccctgaaaaattacctgaaaccatccgcactgtcagtttgtgggtaggtcgtttgcgacgtagcttcaattccatcaagcaggatattgaaaaggaaattggtgccgacgaaattcgccgccagctgcgtaacgaagaaatcatggagaagtttcgccatacccaatcgcaggtaaaaaactctattagctccatccagaaagaaactgaagagttcgcaacgctcaggccgtgatgctcacgggcatgggcgacggcttcccgcttggcgccgggcgttaccatttttttgaggccagatccttcagcaccacgttgtcgagcatcgcctccgcgagaagcttcttcagactcgcgttttcgtcctccagcgccctcaggcgtcgcacctcggatacctccaaaccgccaaacttcgccttgtacttgtagaaggtcgcaccgctgattccgtgtcgacggcatacctccgccgtcggcatccccgcctcgtgctccttcaaaatcgctatgatctgctcttcgctgaacctgctgctgcgcatcttcgtccgactccttcgcgtcggactctaccgaaaatcggtcacatttcaggggtgcacgtcaccgaatatacttctcgtaaagagagattcatcaaaagccgagattttacagaaggaaggcaacctgattacagcgttactttgccaaccgcagaaagcggatttacttattatgttgatgaagtcaaaatactaaaagcgatgcaagaagaacgcagccaaaactattcctttctttttaataactgtgccagtagtgcaaaacgttgtttgctagcaggaatagatgaaaaattacgagccaaattaaaagaaacgggtttagatagcaaattttttgaaattagcaaagtggaaacatgcaagtcattacgtgattgggcaagaactcttgatagtaaattgacggaacttaattttccatcgcctgttcctacccgaggtgcttaagaagtcttagcattacaatctaagatagcaaaatttggagaaagccaagtcatacccagaattacatcaaaatcaaccatctctataataatcaaatctacataaggcatgctccccacataagtcataaggcaagacctatacaccttctcaactatcacagactcaccgacagaagtagagacacgaatagacatgtcaagcaaatcacaatgcaaatcaagaccagtagcgaacgaagaagatacataagaaaatgtggatccagggtcaaactatacagaagccatgcaatcacagactagaagtgtacctatgataacaacatcagatgtctctgcctctaacctcccggggaaagcataacaatgggccttgtcacttgtctgttcgttgccaacaagggattccaataaatcaagtaattgttgatgcttctccttggtattatcttctgaatgctcttttactttctgcaacaaacgatccagcgtttgaacttcaagatttacaccttgtttttgagactccgctaaagccaaacaatggtcatacattgatctggaattgctatgaatggccttgcttttactgtcaagcagttgagatccactttcaactgtcttttgaatcctttctttattggcacccacgatttctgcttgtgaagccgcattccgtaaaaactcttctgaatggttattcataatttcgtttgctttccttatattcgagtttgtatcattgagatgtgaatgtaagatatccgctttggtatacacaccaaatggcccactacgtactaccaaatcaagcccgcagcccacaaaatcaaaattaaacactcacattatgaaattaaatcaagaactatactacccatgccttcggggaactaagacttcctccaatttggtcaaaattggccatttgacgtcttttgcccttaagaatgacgtgaaccactttatcatcgggcaaaaaatttgccatttagcacaattctaggctattcgcacttcaccccactagacccaacaaatagtcaatgcaacccaacaattttaactctatttcaataggcaatgacacgggaataatgattaaaggccgattaattatgatttcatttaagattaggcaaacaaacaatcacacgattactcacacccctaattgattgtttttatttaaccgattcccaaggcttgtaggaaacttcaattcaaaaaagccaaacattgaaagagccatggctacaaacacaacactgaataaagtgattactactggacgttgcattacagtctggattgtacttcccatatacccggcaagcatccctgctcctgcataggtgatagccattccagtcacataactcagtgataatttaaaggcttttcctgtagaaatagaattttgtcctacaataattcctgataaaataggaaccatcggtagaacacagggcgtaaaagccaacaaaatacctaatccgaaaaaagcactcaaataaacaaaagcactatttcctgtaataaaatgcatcacagtatgtgagtacctcgtatctcaacatgactgaagagtagagtataaatgtcagtgtgtggggtctcttgtggtgaaaagtgaggcagggacatgatcacacgggaaattgcaaggtgttggttaagaggtaagtgtttgtcctataggccagaatatactaagctccctaatattgaagactcttcttaatgccaaaaagagtccctgacagtcatgaatagtagttgtattttcttttaaccgtgttatagacaatgattaaggcaaacgtagattcagtgggccctagcagaataaactagccccagtagggatctgtgagccatatatgagaactgccactgtcagacagggagagcaattgaagaactgcagttgggcacaggagggattcgaataccgcggcaacaccaacaaggccaagggcgcgccgatcgatctgatcttccccaaggaaggcctcggctgggacctggaagcgtttgcgatccacaagggcacgaagaacctggcggcggccaagaagctggccgattgggcttccagcaaggacgccatgatgttgtacggcaagaactttgcgatcaccgcgcagccgggcctggcgcctccgctggccaatgtgccgaaggactacgaggcgcgtctggtcaagatggacttcgtgaagacggccgagagtcgtgagcgcgtgctggcggagtggacgacgcgctacaacagcaagaccgagaaaaagtaaccccccgaaggcggcctgacggccgccctccccccagctactacaaagctataaccatacattggctataagtttggccattttctgttttctcatacggaggaaaaaatcacggaatgtttaagatgctttcaagcattaagtctattcattatggcaaaacaataaatattgaacaaaggatgcccataagaagagagcttgagtacttaagaatgcagatttcaatcttcctccaaaactatagcagaggacaagcaccttttcccgactccgctcaagttggttatttcccaacctgtgccttccttgtaacgttcaatctgcaatcacaaagattagtattgattaatggaaccacataggtaatggaatctacgcatagcaagacaatgaaataaataatattatgtaccgtgtctagtagccagtcccgaacatcctcgtcaacacccagcccaaccgcgttaggggacaacttccggtcaagtacccaggaacgaccctcagggatatcaaggacctcggacaacagttgatgcatctcatgaacgacaattccacgttctcgcatcttggccacgaaatctcgatgatcttcctgtgctttttcaacccacaggacgtcatcaaagagcaattctctacaattgcttggggtgagccgacgatgcgccagacgcggctcacacaccatcacctcacgaagcttgccaacttccgaccatgcaccaatgggagtagtcatttcttaacctttcatcgtggggaagcaagttccctgccatggcaatcaccgcagcaccgtaggatagccgtgcgtcgcttcaagaaaggtgacgaactggaagccatcgttctggccatcgacgttgagcgcgagcgcgtttccctgggcgtcaagcaactggaaggtgacccattcaacaacttcgcagccatgaacgacaaaggctcgctggtaaccggtaccgttaaatcggttgagcctaaaggcgccgtgatccaactgtccgaagaagttgaaggctacctgcgcgcttccgaaatctcgcgcgaccgcgttgaagatgctggtacgcacctgaaagtcggcgacaccgtcgaagccatggtgttgaacatcgaccgcaaagcccgtggtatccaactgtcgatcaaagcgaaagacaacgtggaaacccaggaagccatgcagaaggccatttttcagttttgaatgaattggcgaatagattgtgagaaaaaattacactaaacgaaatgataaaagctcttaaaacactcatggtcttacctcttcttgcctgattggctttaattctgcaacagtcatgttattttcttgaaaatatcgttgcgcaacttgctgaatttgctcaggggttatttcattgatggctttggtgtatgtttccgtatttttccaacccagacctattgtttctaacaatcccaactccatggcctgaccaaaaatagaatctttttcaaaagttttttgtgctatgatttgatttttaaccctttgtaattcctgattgctaacaggcgctttttttaaggcttccaattccgtaattaatgcccactatagcttcttttctaattgcaagatcatattttaacaaatgcattcaagtaacctcacatcaagaacgattccgtgctctcacaaagaaaatgaataaatgagtaaggaatcaatgcaactctcactctctcaaaagagaaatacatgcaagctttatcccataggtttgcccatatttttcaatcatcacacaacctacttcatgcaagatctcaaggttcttttaggcttgtaatgagagtgagggttaaggtatggtcaatttggtttagtgacttcaccttttcaaagcattgttgcaatcatcttcacctcttctcaagttcttttcattctttttcatttgagaactcaaattttgacttgtaaatcattttattggccaatacggttggcttccatcattaactcaacgtcatcgttgaacgttttaccgttcaaggccaccggatagccacgctcaaaacggaccacgacctcttctgcggacaccttcacactctcgtcccagaacttcacccccataatcgggttcacaatcttcacactggagttcaggaattccagatccttcgcttcgtgcgtggcacccagcatgttggaatcagtcgagtaggctttttccgcagacatcttgtaatgaaaacccgcgttgaccataaactcggacatttcctgacgaccacccagctcatcaataaaatccgtatccagccatggtttgtagattttcaactccgcattggtcagcagaccataacggtagaagtggttgtcctggcccggggcgagtgggaccgctcggcgcgtgacgcagcgctgcccgaacggtctccagctcacgccagcgcaacgggtcggcccgcatcgcgttgacctgcgcgaggcatcggtgcagggcggtgacccccgcgacgacggcctcctcggacggcaccagatcttcccgacctgcagcgctgccgatcggcaccaacgggtctaggccgaacccggtgacattgggaagtccgcccagggtgaccgccagctcacccaggtggtcgacgttgagggccgagagcaccgtcgtcactcgcaccgggacatcggctcgagccagctcaagcaggccccggaaggtcgaggccgccgacccacgcgcctgctcctgcacccaatatacacgtcaatattagttctaacttctcaaagttgcaattcaaataactgaccgtttcttgtttggatcaccatcaccttgcacgtcattgcttgaaggtctgcctatctgaagcacatgacttcacctataaagccccaatgcctcgcttcacattgcatcatccccctaagcaacgaagcaatgacttttaacaacactggtaggagtaagacaatacatgcatgagaagtttagacagtgagataggagtgaagttaaatgtcagattagatgaacttgaggttcaggtgcctaactataggcaatttagatataggctcaataatccaggagaatggaatgatagattaatgttcacattggattaatgtaggatggggccagaagaccgtcgggggaacgttaccgacccgaatcgcctcggcataccatgccagtttggcgcttggaaccccatagatcttagagccgggagcggctaccagtcggtcggccacctccgactgcaccatgacgacgccggtgctccactgcggacatattgccagcatgtgcaacagcaccggaaccgcaacattatacggcaagttcgccaccaaggcggtgggttccgcaccggggatgaccttgacgtcaagggcgtcggacaggacgacttccaacctctcggcagcacccggcattcgttcagcgacggtaccgggaagctggttggccaacacctcgtcaatctcgatggcaacgacctccgcgccggtctccaacctattgttgtaggcaaatttgatcaatggaatatggtaatcccaattacccttgaaatcaatcacacacgccctcaacatgtcctctaaggtttgaatggtgcgttcggcttgaccatccttttgagggtggaaagtggtactaagtttaacattggtaccaagcccttgtttgaaagcattccgaaaatgtaaagtaaattgaatacctcaatccgatatgatagagaaaggaaccccatgcaacttcactacctccttgataatcaacttggcatagtcttccaccgaaaaggtaaccttgacgggaatgaaatgggctgatttcgtcatcctatcaatgatgaccaaaatagaatcatgttgccttcgagtgcgaggcaaacccatgaacctaggctctgataccaactttatcacgacacagaccgtcgtgattgacatccacactaactctccggtgggagaaccactactataacccaaactaagcaactaatctaaaaaataaggcattttaaagatacaaacaagttaaatacaaaggaaaaaaaaggagttcccataaactccaacaaagtctaacaatgaactaaacaatgcagaataaataacctagaacctgaaagtcaatgtaccaaaacatctaaagttcaaaaagtctaaacaagaagggatgcaaccctaatctactgaactaatcaactaactagaacaaatgtctaagtccgaaaatggtggagatagatgaaagagaacccatggcctgtctcttactgtgacatgtttcatggtaaatcccaattttgctaatgtggaatgatttctacattttcttatttgtttagtttaaatgctatgattgtttgagggatattgggtctaatcagatctgacacactttctaccagactacataaggagccttaaaaaagaacactataacaggtggatgtatagagaagtaatgaaagttatgttctcacattcttcaattatttgaaggttaaatcgactatttgatctcagttcctaagacgttaagtgttgattgatcttcctccccaaggagctcaatttacctctgcacggatgatctacatcagaagattttcaaaactttcaataatttcttaccatttaaggtatagttttattcggttaaagctgccacatcactgattgataaattgtacaaagaggggatagagtttaagaaatgtggcgtgatgttgtgtgaattgataaaagaagaacatcgcacgatcgacctactaactgacgtagagcagcttgaaaaagagcaagcgttaatgacggcgtttcaaagcattcagagtaagtttggcaaggctaaaattgctgctggatcatgtaatctgaaaaatagagattgggaacctaagtcagaacgtcaaagccgtaactattttagtgaggctggtatgattgtcttcaattgattcatttgagggaatttgttggcaatgacggggatggtcagactcgaactggcattcaaggaatcaaacctttgccttaaagctccaaatcactgcggtattaccggagtttcgttacgccttatccagaagatgtaccgcttggcggcgtaacgcatgatgccatgcatcagcagtccgatcgcagacaggacgatcagaacggcgaagacgccgggaacgtccatactgaaattaagcgtcacaacaaggtagcccaatccgacttgagcaccgacaaattcaccgacgatcgctccgatcacggccaacaccgcggcaatttcaaggccggcgaaaatcagcaccagcgccgagggaatacgcaagcgaaaaagcgtttgcaatttcgtcgcgccgaacgccttcatcatatcgagctgatctctgtccgtggcatgaaatccggcaattacgctgacgagaaccgctttgagcgcatcttccaagacatgacgtaattgggtgaggagttgctcataacgctgcggaatcataaacacagactcggcattaatttgcccagccattaaaccttgctgagccaactcttgtaccgccggtgataagccactgcttctgaaccagtactcccacttctccacagtccactcaccgactaactgctgcggttgaagttgtaaaatatcttgtggcattaaatcggctgatgcagttgaaacctgttcaagttgaacgggctctacaatagcagcaacagtttgcaggctttcattttctacaacttgggtgtcctgtacgctatcagcagacagcacttcatttgctaaatcagaagactccgcttgtacagcacgtagtaagacccggaatgttgccaatatcaaaaccaaacttatcacctccgagaggtttaagaatgtaagagaaaacaggtttctcggtaaaagtcaaaccgacagtcttggcatacgggtatttatcaataagctttactttaacacgaaggttaccagtgaaggaaaggtcctcaattaaaacaggcattttagctgaagcaatactttttcctattttcaaatcaagagcaatcttaggtttgatgcaagcagcaatctcacgacccgttaagtcactaatatcatttggactaaatgctaatctcaaatccatcataacagtgtcttcctctgttttagggtaactacggataaatcccattctcggtgatttggttcccatctccgagatccacgggcttcccgtccaggacgccaaacgcgcgaatgcgctggtgctggggctcatgctcggcaaggacgggaagaatctcgtccagaagttcagcaagcagtccggcggctcgaagtcgatgttcggcaactggggttcgacagtgaccaaacagctccccgcccccgtcgtcgacctgctcgtacggaaactgcgcaagactttcatccgcaaattcgccgcacgtgctggcggctcgctggtcggtcgcctgatgcccttcggcatcggagcgatcatcggtggtgtggtcaatgctcagatggcccgcaaggtcgccaacgaatccaccgaggccttcggtgccgcgcccacgatcttcccgctggagacggtgctcgcttacgcgaaaatgtcggtgttcgacgaactggtcgccagcaatttgccggacgatcctttcttcagccgggcgctcaaggcatatttcccgcaagtcttgtccgaacgttttgccggggcgatttcggcgcatccgctgaagcgcgaaatcattgcgacctacatcaccaataccgtggtgaaccgcgctggcgcgactttcgtgaacttcatcgccagcgaggccggtgccacggcggctgacgtgatccgggcgttcacgctggcgcgcgagattttcgatctcgaacctttatgggatcagatcgatgcgctcgattacaaagtcgattccagtttgcagctcgatctgttgtcgaaactgatcgcgattacccgtcttgcagcgttgtatccaggtacccggccaccaggctcgccagcattccgcgctgcttttctgggtcggcatggtcgggtgtcagaatggcccgcagaatcccgaaacgctgaaccagcgcacgctccacgtcatcactttgcttgggactctgccgaacccggatttccacgatgccctcgtcctgggcgcggcgcaacatccggccaaccgtcgcccgcgagacaccaaatttcttggacagctcctcctgagtcaggccgtcgatgtaatacagggtcgccaggctggtcagttcatcaatgctgtagcggtcgagagtggcagaatgatgtggagcaagcgacataggactcctgggtagagtggggagaaatgagacaatcattacggcgcatacgctctaaatactgtggcacgtccacctgtcgaatcgatactgtaatcccgagacgtttaagatttcgcactaatggcattagggtacgttgtaaaccgtcctgatggattaacaattcaaactgaatcggtttaccctgatggtctcgcaattgccctgctttaacgctataacccgcatcgatcaatagctgtcttgcggtcagcaaattttgacgattaaaaccactgccgtcactcacgggatatttccagtctgcaagtacaccttgtttcacaatcggatttaatttggatagatacggctgtaaaactttaagttctgctactgaaggtttccctgtcgctgccaattcgctattatcaaaatcgccgacaaggcccgccaggaccccagccggatcgcctaccagaagccgcaaccgttcgggatgatgccggacgtcttcttcggcggagcgctgaagcttgacgatgacgaacgggactgggtgccgcaggcgccgggcgtctggttcaagccgctgatcctcagcgtctcgcaagggttctacgtcaacctgctgaaggtccggcaatcgggcgtcctatcgaggcaccggcattccggcccggtccacgccttcacgcttcgcggttcctggcactacctggagcacgactgggtagcgcgagaaggcgattacgccttcgaaccgcccggcgagacccacacccttgtcgtccccgagggcgtcgaggagatggtcacgctggttcctgttgctggaggcgcgttaccggttgtcgtcggacacctatgagcccacgccgccggaccatcccgagccggtgctcacttgcgagttcgttgccctgtcgcgccagcagccattccgtgcaccgtgtgtgtcgcgcaaaccgctgatgcacggcccgcagaccgccatggtggtgggcaagcagggcgaagaaatctggaccgacaaatacgggcgcatcaaggtgcagttccactgggaccgcgaaggccagcgcgatgaacacagttcgtgctggattcgcgtcgcccagggctgggccggcaaacgctggggcgcgctgtacacgccgcgtatcggccaggaggtggtggtcagttttctggaaggcgaccccgacgttgataattcatgatatacatttttaaaactgtaattatcagaatgtagtgctttagttatagcgcctaatgcattcggactataaaatgcaattgttggaataaaacgtccatcttctttaaaagctgcgacatctaaatgattttcaataagatgagaaactaaaaactgatacaacgtgcttacagctttaccagtaatcattggtgtatcaacagaaacgacaaaaaacaattcttcttcaggatgttgcttcatgattgtataaattcctgctaatggacctttatcattatgattctcatcatctataacaacatttggatatttaaattgcgttgccaattgcgcatttgtactaataataatttcattgaacatatgggtaccaaataggcaaaatatccaaacgcaaagtaaagggcgtctgcaatatatgcgcccacttgtccacctgagtttgcaactaccgctccagccggcgaagcatgcgaaaatccaggatcactgattttataagtcagtaacgacaagagcacaaaaagagcgcttgttaaaattaatataaaactaccctcactaagtcgctttacaacatagctaggcatgtgttttttagaagcaccagatttttttcctgaatgttgtttttccataggtattttcatatagttgtttttgtcataatattcgccatcttaacacaaaatatcaaaatattaaggaaggcagagacaatgagctcaagcaatcatcaccgcttaatcaattattctcagtgctggggaaacacaaaataagagaatttgctattttatatttttgtgtatattactttatagtattgtgatgcaccattccagttgaatcatcctaaaaatgcgaggcgtttaaatgtttaatcctcttgataatcggtatctttacaatatctatgattttaatatgcgtttgcttcaaccttactcagattattttgacaatatggcaaaacgcttccgcagaatttctgacaatattaatttacctgttcgtattccgtatatgtcagatgatgatcagagtgggttgaaaaaaatattggatgcaacttcaggtcattttcgtagattatctggatattcctacatatttcatatggttaccaatgtattttcaggtgggcatgggcaaacgccgccgaggcgcccagcagggacgccagcagtgcgacggtcgttagtgtcttcttgatcaacattgttcagtaccttcaggtgagggagtcggtaaggccatgtgcaacaagggaaagggtttgccctcgccatccagcggcgaacgcgcgacctgaataaaaccatagtgcaggtagaagcccacagcctgtgggttttgctcgtttacgtcgacggtgagcgtgtcgtgacgggcgcggacgtggtccagcaattgccggccaatgccctggccccgtcgatcggggtcgataaacaacatttccacattgctcgcacccgtggcgatgtacccggcgacaccgttctggtcttcatacacacggtgagaagggaacaagtgtgagcgaagtgtgagctacgcgtgcatacgtcgcacgtgacgcgggtgactatgtgacgtgcgtgatctgaactcactttcacagccacatcgttgaacgtggtcgaatcgacagacacccaccatccagtcagctcggtaccgcttgtgacatatatacaatatcagatgcgtacacgatccggtacgatgacgacattaactcgatcggtattgcaatgaattcgcctcaccgctttttcttgttaccagcaatcggtcttgccgtcgtactgacggcccatcccgctcaggcgcaaagtcgcgtcggcgaagcggcgatggtgaagaacgaagttctccgcgtcgcggctgcaaccacgcatcagactctgttgccagtacttaaaaaccatctgtgtaagcaaggtgttatttgccgagattacacctttgtttcttcggtttatccagggagaattgaagcaaggaaggaatcgcatcgatttgattttgtttttgattgccgaggtttaggggcaaaaacctcttttccatatctgcgcggacttcgtggggagcttgtttggttgtatgcaccggaagttcagctacaaagacctattcgactcttacaccctaggtacaatatttacattgcaccacgccctgattctcattatcttatcggtgcgagtgagttggaaacagaagattccagtccaatttcggtacgtacaacgcttgagttattaaccgctgcatactaccaggaggcaaacaagcgatttatgtggtcttccattgtttggtcatttgtcgtggcttacgccacttccgttgtcttttatcaaggcgctaaatttctggatcatcctcaacaaagtatggtctggattttggctatgtcactgagcctgctttttgttttagctgtatttcgttatagccagtatggtatggggaggcaaaatgctgctgcaaatacgtgattttatctaccgggaaggggtagtaagcactcaacagttgagtagggagtttcatttggatctgaccgcattgcaacctatgctggacttatgggttaggaaaggggcaataaggaagtgtcagggaggagccaattgcaaaactgcgtgctttaaatgccgcagtagtagaacagcaccggtttgccgcgacggatcgacgacgccacttcggcatccagcgccgcaccggagccggtgcggaagttgacgaagctgtcggtcaagccgtaggccttgatcttctggctgttgacgatctccgacgtccagccggtggggctgttgaggaagcggccacgggtggggtcttcggggtcgcggaacacgtccttgtagcgcggcaggtcggcaaccgacttgaggtccggcgccagcggcttgataccgcgcgcggcgtcgcccttgatcacaaactcaggtacccaccagccttcggtcgcgcctttgacggtgtcgcccaggccgaataccttgccttcgctctccgccttgacccatgccggacaaattcattgaaatttttataagtaatatatgtctagaattaataatcatacattaaatcatacgtatgtaaattgtttttgttttttttttcaagcagaagacggcatacgagatgcagcgtagtctcgtgggctcggtggataaccggatgaaggtgattacgatgctgtaaccagggcgaaagttgttcatcgttaccagaacgtcggaaatagatcaccatctcgcgggcaacgcggagcgattgctgcggatccagaaaacggctaatcaaatgcagcgaaagatcgatcccggtggtgataccggcactggtgtagacgccccggtcttcgacaaaaatccggtttgctttaatcaacgcccgcggtgcttgtcgggattaagaagacggtccgcaaatccgcggcaaagaagcaggaatccccagccgagtccgaaaagcaggcacagccggaagcagaagaggagctcgaggaggacgagcacgacgaagacgtcgacttcgatcccaccaatgcggacatcgaagacgatgatgacttcgacgctggcgaagacctcgaggacgatgacctcgaagaggatttggacgacgacgatgaggaagaagaggaagactcctcttccgtctgggacgaggaagagtccgctgcgctgcgtcaggcacgcaaggatgcgcagctaaccgcctctgccgactccgtccgcgcctacctcaagcagattggtaaggtcgccctgctcaacgccgagcaagaggtttctgtccacgatgttgtgcagggcgtgcgggttgacctcgtggagccactcctgcatcgccgggtcgagggcataacgacgcgccaccttctcccacaggccgtcgtcgacgacgtcggcggtggcgtcccagccgatgaggatgtcgagcaccttggacaggtccccggcccccttgtacccgtggcgctgcagaccctcgatccacgacgggttgaggattcgggagcgcaggatgatccgggcctcctgcgtggtggtgcgtgtggcgatccgggcgggatcggaggagtcacccacgaacgacatcggtgcctcaccgcgcaccgtcgtcgcagcggcgatgagcccgccgtagtagttgtagaagtcggtgcagctgagcacttgagggtttaaaaggagcgagagatgtgaattcccagtcatctgtgcccttgtggagatctaggcacaacagcacaacattcacaatagattcttattagagagcttccttttggtctgattccagcagaagggttttgtaacttgtattgttgagtcctcactttcctgggaggaagatggaaaggttagaggaaaatgctggtcaagaaaggtcataattccctggagttgttggatgtgacaaagaagcagatatttcagtagaaagggcaccaatttgcctgctccttgctccccacttgggagacttcaggccactctaggattcggagttttccctccacatgggactgagcaggactgagcagcggggccaggccacgcagcagcatgtcgcaggcggcggctgcttccggcgtgacttccttcgggtggttgaactgcgtgttcaaccataccggatgcagggattcgagcatgcggcagagttccggagtgatccgggcgggcatgaacaccggaaagcggctgccgatgcgcaggatctcgacatggggtatgtcccggagggcgcgaagcagggcttcgagcttctgatcggtgtacatgagcgggtcgccccccgtcaggaggacgtcccggatctcgggatgatccgcgatgtactgaacgtcaggctcgaaggaggccccttcccgctcctcgaaatacgtgccctcgacgttcgtggtgtggtacttgcgtgtgcagtgccggcagtatacatgttggccaggctggtcttgaactcctgacttcaggtgatccacccagctcggcctcccaaagtgttggaagtacaggcatgagccaccgtgcctggcctgctcccctgtcttgtgtgtgcctgatgactgcattctgttcattactctcacaccacctttcttgattcacatgtatatgtgtgtttgtgtgtatccttaaatacttgtgtgctgtttgtctccctccccaggttgtaaactcgtggcagggacatggcagggaccatgtctgtttggtccacctctaaacatcagcacctaggctgggtacccgggatagaataggtgcttcataaatatttacttcttttttgagcacctactatgtgcaacgaattgtacacgtttacgttcacgtggcggtacatcaccatgaatttttgcaactttaagtccgttacttgtcaagaaatgatgaatgtcatcaacacgacctttggtattggcaaaaatcattgccatgtaaggattcgttgcttttgtcaattggaacaaaagttgattatgagaacttcctttggtagaaacaagccaattttcgattgtatctgaaattactgtcttattggcgattttttgcatgacaggattatgcaaatattttttcaaaaatggttgaagtttttgaggaatagttgctgagaaaacgagcatttgtacgcgtttaccaaaacttgaagcaatttggtcaacatctgccaaaaatcccatgtcaagtgtcatatcttctatttgctgcttcatctacatatgactttggtgcttgcttagcgacatactcaaacaaatcacctactgctgattgccccgcttcataagcaaataattctggaataattgctccttttacagaacctgatatacctggcacttgatgttgcttttcatttaacataagatggcatgtgcttgttcccatcaccatagtcatttctttatctttttcagatccaatacctaataaactagcatgggcatcaataataaaaggacttaccatagtgtcttttgataatcctaatttctgtgccattttatcatccagtttccctactgcttcaccaatattaacaaccggtgcagatactttatcttgaattacttttgatagtatgaacctcggttttaccattcgcggtatggatctggcgattgccgccggggaagccgcagcaaaaaccgtgctttcagcgatgaaaagcgacgatttcagtaagcaaaaactggcggaatatcgtcagcatcttgagagtggtccgctgcgcgatatgcgtatgtaccagaaactaccggcgttccttgataacccacgcatgtttagcggctacccggagctggcggtgggtgtggcgcgtgacctgttcaccattgatggcagcgcgccggaactgatgcgcaagaaaatcctccgccacggcaagaaagtgggcttcatcaatctaatcaaggatggcatgaaaggagtgaccgttttatgacttctcccgtcaatgtaccagtaggttatgcaaataacttcttattgaaaaagaattatgctgtagaagcaacaccaggtaacctgaaacaattagagttacagaaaaaacgtgcaaaacaagaacgccaacaagaaattgaagatgctaaagcattaaaagaaactttatcaaacattgaagttgaagtatcagcaaaaactggtgaaggtggtaaattgtttggatcagtaagcacaaaacaaattgccgaagcactaaaagcacaacatgatattaaaattgataaacgtaaaatggatttaccaaatggaattcattccctaggatatacgaatgtacctgttaaattagataaagaagttgaaggtacaattcgcgtacacacagttgaacaactcctggccagtaccagcgcgcctaccagtgtcgacatcagcatcaggctttgctcatcggcatccgcgtttcccaaggccgcttcgacttgcttcaaccgagccccaagcaccgcatccgtggtcgggctaggctggcctctttggcccagttccgaagacatggtcggtagcgggcaaccttgctccggtgaggtctggtgccattcagacaggtagctgtctatgaatgcatccaacggccgttcctgattgaacagcgcttcgcaatgcgcatccagttctgcagcagtcgcctgcagggctttttccaccagttcatccttggatttgaaatgcgcatagaacccgccgtgcgtcaggttcaaagctttcatcaagggcgccggccccggtgacacccgcttcggccaacgctgcgtacctgaagaacccggcgcccgagtacccgtcactggcccagcgccggggctgggaaggcacggtgttgctcagggtgcatgtactggccagcggcaaaccgggtgagatccagatccagaaaagcagcggtcgccagcaactcgacgacgctgccttggccgccgtgaagcgctggagcttcgtcccggccaagcaaggggatgtggcgcaagacggctgggtcagcgtaccgatcgatttcaagattcactaactattcggctgcggtgtgttgcacacgccgcgacatgcacagagggaacacatcatggcattagcatctccacttgaatccatcgaaagcccatggcttcgaacacggtcttggcgattttgccggagatggtgttgtccttgatgcgcagcagcatgccgcccaactgctcggcagtgaccggagcttcgtcgatttccaggccctgtttgttcaacaggctgcccagctcaaccatcacccagttggccgccagcttggcgtcaccggcaatgctcacgactttttcgaagtagttggcttgctcacggctggaagccaagacgctggcatcgtagaccgacaggccgaactgctcctggaagcgctcgcgtttttgctgcggcaattccggcagggtggcgcgcacgtcattgaggaacgagtcctcgatgaccaccggcaacagatccgggtcggggaagtaacggtaggcctaaagccaagctagacaagatcgccagcctgaaaccggcgttccgtgaagggggtacggtcactgcggccaactccagctcgatttccgacggtgcggcagcgctgctgttgatgcgccagtccgaggccgccaagcgcgggctcaagccgctggcggtgatccatggccacgcagcgttcgccgatgaaccgggactgttcccagtagcgccggtgggtgcgatccgcaagctgatgaccaagaccggctggaaccttgaccaagtggacttgttcgagatcaatgaagccttcgctgtggtgagcctggtgaccatgagcaaactggagatcccccacgacaaggtgaatatccacggcggcgcttgcgccttgggcgaatggacgaacctgataggtcagatgctggctggtctcaagcatcttcaaattcacggtcagcccggcttgagtcagctgttcttggatcacctgagccagttcctgaatcttggggaattgtgaggtgcgaactacgagattgattggcgctgaaacgtccgtgccgtctgccttggcctcagctacaagttccttggccttgtcgacattgaattcccacacgggcaagtcatcgctgtgcccgaccactccggagggcaccagctgggcggcagctttgtcacgacctccgtagagtgaagcgacaatcgattccttatcgatggcatagttcacggctcgacgaatccggatgtcatcgaacggtgcagtgtcagcggtgctgcaatcgccgcgcctcggcatggcgatcgacgcattgctgcgtgcttacgatcatgtcgtgctcgatgctggtgccgccgtggatctgccgcccgcactgatcgccgcgcaggctcatgccgtgatcgttcccgcgcccggtatcaacgccggcgcgcgcgcagcgatgcgcgatcagttgctggggtcgggatttatcgcggtgacgatcctggacgcgccggcgacttcgcccgagatcggacctgcgggcgagcgtatcgctgctgcttgaatcttacgacgcggaattaatgattcaaagccgcgcggagccgctgggccatctgcatcagtgcgggattttgtttcaccatgcgcttggcgtgggtcagcgaatggccaacttcgtacccctgaactccgctgacgacggactccatctcgccctcggcgtcaccatggtcggcttggccatcctcttcccccgccatcgcaacgtgaaaccggcgggcaccatgcgctgaagcgcgggccaccattgccgcgtcactgaatcaaggagaaaggatttccggttcgctgccagactagctgtcatccagccctgcatcagtcccgattgcggagagccgacagagctcgacatctggatctctggcggtccaccgactgctacctagcactgaattcggaagtcgcatcggcgtcccgcatggatcatcaatggagaccccccagaatagatcggcaatgagcatgcgtctgtttgtggcacgagtcaatgggaggggaatgtatatgagaaaagcacatcaattaattcaagaggatgaacattattttgcgaaatcaggacgtattaaatattatccgttagttattgatcatggatatggagcaacattggttgatattgagggaaagacatatatcgatttgttatcgagtgcgagttctcaaaacgtaggtcatgcacctagagaagtaacagaagcgataaaggcacaagttgataaatttattcattatacaccagcatatatgtatcatgaaccgttggtacgtttagctaagaagctttgtgagattgcacctggagattttgaaaaaagagtgaccttcggattaactggatcagacgcaaatgatggcatcattaggtccctgggtcagttttaactgtttttcgatgcttattttgtctgttgttcagactggataatttctattgatctacctttgagttcattggctctttttttttatcatcttcattttgctattgagtccattcgtgagttttttattcagattactgttgtcagttctaaagtttctattagttttctttatgtcttctatttcattgctgtttttccatttctatcaagtttgttcttgataacttgaataatcagcgactcagtggtgtaacatattggacatcaagaaatacctatccatggatagtatgctgtctcttcattattaggggaaaagcgtaaatgagaggaaataggctttatgagttaatctagaatacttcacaccctgcataccactcatgtgaaacttgcaatccaccttagatcctagcaaaccatgagtttgctacaactctgctacaggagattagcttgaaaaagcgttttccagatttgaaggtgttttgcattcttccaggtttcctctctcaatagctcctgtaaaacaaatgtttatactgagaagagctgaacaattacaccttatcaggccattatagacagcttcaaatgttatttactgattaacatactccccataatctcttccacactgtctcgttacatctacataatttacactttaagataaggacatggccatcattttataaataaaaagttgagattaaaacaggttgaaggactttctcaagatcatccggctcacctggaagaccgcgtccggctccagatccccgaccagcttccgatgcagtcgtcctgcccaaccatcgtgctgccatgggagcgccgctcccagaactccggccaccatacgttgatcgcctggaagaacacgcgcgaggccggccgtgccgtccgcgacgcgatcccgttcctcggcgatgccacggccgtcacggtcttgagcatcgagcggccgggctcgcccgatccgaccggagaacagatctgcgatttcctgtcgaagcatggcgtcaatgtcgagttgcgtacgaacatcaacgacaacgacgccagcgtcggcgaaatcatcctggacgtgggccgcgaactggattgcgactcattggtgagccatgatgacggcctcgacggagtcggcgatgacctcgcgcgagacgagcgagaagtgcatgccctcgtggcccatcgagatgccgtccgagaccgagatggtgccgaactgcagggggtagccgccgccggcgtgcacgccctctttggcgccctgcgcgagccggtcgaggctcaggttgcagggggtgatctcgttccagctcgaggcgatgccgatctggggcttgtcccagtcctcgtcgcccatgccgacggcacgcagcatgcctcgggaggtcgtggcttcgatgccgtcggtgacggcacgactgcggggcttgatgtcgatggtctcggagctgtcgggcatgctcgaattctatgcccggcggcccggggaccttcatacgttaccgcaaccatttcgctgttgccgataacagatttatcagtggtgaaagtaaaggtctgaccagctttcagagaaacgtcgttaccgccttccagtttcatggtgcggatttccggacctttggtatcaagcaggatagcggcggttttaccagttttgctcatcacgttgcgcagattctgaatgcgctgaccgtgttctgcatagtcaccatgagagaagttcagacgcataacgttcatgccagcgtccagcattttagctaacatctcttcagattcggttttcggtccgatggtgcaaacaattttggtctttttcatgacagtcttagtctttaagttgagaaggatgggagaaacttgcttgtattcagcgtccgggccagactttctgacgacacgcccgcagcccgggccgccgtctgattcaccgtaagggtaattactctctccggttcaccggcggtctggttgacttcacgtgtgagcggtgaccggccaatcacgtccgtcaggtgattcgccagcgcccgaaccttcacatagtccggcccgctaacccggtatttgatgggccagccgaccgggggcccgagctccaggggcgatacgcgcgtgataatgtcgctaaattgcgtcgccagtatcttgttcagctgtgcgtgcagacggtcgcgggcggcgaggcttttcgcgaccaccaccaactgggcactgttttcattctccagcagcacatccattggccctggaaacccaacgcaagcaagccctcgagatcgagccggagttgacgcgcctttcccgcgagctgggcgccgccgagcgcaactacgcgctgtatgtggacaacctggaaaaatcgcgtatcgaccgcgagttggataacagccagatcagcaacatcgcggtgatcgaagaagccaccctgaacccaggccgcatcttcccgaaaaccctggtgatgctgctgttggcgatcccgtttgccatcgtcgtcggcctgctggtgatctacctgtgctacctgatggatcagcgcatccacgacggcggcctggtggagcgcaagttcggcctgcgcttgtggaccaccctgccggagctggacaccaccaccgcacagaggttgtagtggttggacgcaaaggtgccgctgacccgaacccgcaacagttcatgctgctggtggtacagccactcttcgcggccgctgtagtggctgttgagcaggcaggtgtgggccgccaggtcggcaggggtctgtggttcgccgtgttgttcaaggtaagccgggctggcacaggtcatctcatgccaagccaatagaggcttggcgaccagacgctcattttcaatcgcgcctgaacgcacccctagatcaaacccatcccgcgccaattcccggtagctgttgttcagctccagttcgatctgcacctgcgggtactgcttggaaaactccagcagcaagccatcgaagaacgtttcgcccaacgacaccggaacttactcatgggcgcgtaagacagcgggttctaccaaatggggggttgtgattcgtcggcgccagaacagccaggaagtgcctgccagcacgatcgcaatcatgggggccatgatgctggtgcgccagaagccaaggtctttctccggtaccaggaatgggcccagataggtgagttgctgctgctcctgataggccgtcgcgggcacgaaaacaacggtcaacttctgcgtattttctatggctgaagccatgccggggatgctgctggcgaccattctgcgtacacgcggttgaatattgtcagggtccaagcgcgggtcatgcttgatgaacacggacgcggacgctggctgcaccggttcgccgggtgcgacacgctcgttatatataggctcggtcaagctatattttagcggttgataaacaagcgttgccttcattgctgcggatgaataatccttgaattcgaactcaaactcccatccgtcgcctggtgaatcaacatgctgaaggagcttactgaaacggcataaataacgtttctcgccagtggactctggctgaacaaaaaagaccccgaggtaaggagccgtcgatccactctcctcccttaactccgctccgaatacccgcgcggggctgtgtaaaacagtagtggagatcaagttttgtaatggataactacgcagccgccaacgtccgttcgtcgataaggttgcaaattgcagctcccattcgacgacttgtcgaggcttataaatatccacgacgtcgttaagcgggtcagagtacggctccttcgtctcgccagagcgggagttctgcaaggtggatcctacctgtgcgataccccagtacttctggcccggcttgacgtcgccttccgccagtttcttgaagtcatcgttggactcaaagtagttccagtcggtctcgccggcggaaagcttggcgtagtcctcctcgtacataaagctgtagtccggagtatcgaccttttggtggtcattgtcgtagaacgggtgaccagctgccatgacaacatcaaggtcgctgccgagcatctcacggctaatgtcctgcagcttatcgcggtccttgttgtgcgcggcccacgccgccggagtggcttcggaatagaggccctgcccgtcgaccacttccaggttcatcttcaagtggttttccacctgttgcgccgcttcggcccaagcctcgtcgctgacccgtgcgccggtcatgcgcagcaattcgcggcccaacgcctggggcagcgagccttggccaaattcaatacgctgcaaggcagccttgacgaagtccggcaccggcacaaagttcttgcgcagcgccttgggcaggttgcgcaccagggcaatgcacttggcttcaatcacccccggtaccagccactccaggcgttccggcggcaaggccggcaacagcggcgccggcacgcgcagggtcacgccgtcgcgcggatgattgggttcgaagtggtaactcagggccagctccagatgtatgcaaggctatagcgcagcggaacggctggaacggttgcccatcagcggctaccaccgagtcattttcatcatcatcgccctggcgtttttcttcgactccatggacctggcgatgatgaccttcctgttggggtcgatcaaaaccgagttcgggctgagcacagcccaggctgggttgctggccagttcgagtttttttggcatggtggtaggggcatcgttgtccgggatgctcgccgatcgctttggccgcaaacccgtgttccagtggagcattgtgttgtggggcatcgccagttacctgtgctccacggcgcagacggtggagacgctgacgctgtttcgcatcctgctggggattggcatgggcatggagactctccccttcccgggccgaggcccccctcaatgggttctaattctaagaaggggggcggcgccctgaatcaatcaaaaagcttattgatttaattgaagggaactaagacgattagcttagctagcgttccgggagaatctagtcatttaagaacttcgttgccactagtaaattagaccatcccccccaaaaagaactcggagcctaaagagaagagagttcagtctacaagaagctggcagagctttagccattgggccacatccatctatcctaaacagtaacccctttcttgttcgttcttcgaatgacgctagtggagactaattccttccggctaatgaagatactactccagtctttccagtggatccttcgcggtgggcagtgcagcacttctgctgccagtttcgtcactacagtatccagaccagtaccaatatccgcaccgccagaatgaacgataaaggtgccgtccgattccagtttgatcatgcagttagcctgatcgatatccgggatacccgatttctgcatgataatggcgacgccgcgaccgatgtgccagtcaccattttgcggtttcggtgacgaccattggatcatctcgcgaccctgacgcaggatctcttccagtgcacagctggcggcggaaggaacggaggtcggcgctttaccttcaccgattgcaccgagaattttcagctcttgcccttcgtgtacccggttacgttcgataatttccagttggtcgatcttactatattgcttctgatagtgtgacgagtgcaaggaacactcctttcctggaaaaacttcttgagaaagatcttgaagtacgagtcatttgagctaactttagctggtttcttctctgctgcttcttgctagtttcgctgacattggctggttcctgttacaggttctgttcttagttgatcccattgacgaggttgctatccaaaatctcaaagcatttaaggagaaaaacttcattgacattagcaaagaggacctagatttaggttagtgatttgagatgttttgcctcttttttttttatgtccattccctttttgctgacctgcttattttgcaatactaatatgctggctatcctttgttgtaggtgataagatttggggaagtgtagtagttaaggttctggctcaaacaacaactgcagctcataaagttgactttagtggaaggatactggggtatctcatggaatcttgggaactgttgaataaccagggaaactctgggaaactcactggtaggaatccataaactgtcctcctggtgggctgtaaacaactcaccctctatgcatctcacatcaaaattccagtttcttgggaaaacaagtctgtttgcccaatttgggtcatatttccacctccatgttactcaggcatgattcatctgcaagttatgtgtatagatattttgctactgttccacccttacgctgtgctggggagggaggtgtcactgtgagctgtgtcggtgccgcaccaggaaggtccgcgaccgctcgctcggcgggtgcttgtcggccacgaggtcggcgatgcggatctcgccgcgcagcgccttctcgatcgcggcggtgatgcggccggcccggcgcagctcgtcctcgtcccgctcgaaggcgcgcgagatgaagatcgaatcgagggcgaaaccatccgtggtggtgaagatctgcgcgtcgacgatgttgccccccgaggccgcgcagacccccgtgacgatggcgagcaggcgcggatgatccggcgagtagatcgtcagctcggtgacgccgcggaccggatcggtctccgtggcggtggccacggtgcgcccctcggccgtcagcgccttgacgaagcccgcgtgcttgtacgcctgttccagcaggctttcaacgtgataactcagatgctccattttcaggcgactcagcaggacttccagttcatgcatcacaacagctcctcataggcacgcagtggtcgatgttccacctgactgacctgctgccagagcggggcgtgatgctccggcactgtctgccagccagacgatgctgaacagaggcgatgtgaggccaccagtttctcattactgtagatccgcaactcgtcatccagcgatattcgtatcgataccggctgaccacacagcgcttcgggaacgctgtaacgattaccaccaacctcgatatagctgtcccaggacacatggcggatatcgaagtaactggtatcgaagtctgtatccggtatcctgacgcccgacctctggatcgagccgctcggcgcgctggtgaagaccggacctgcgatcgtgctgatgctggtggcgctcttgatgctggacaatcgatagcgtttgcaagcgaagtgggaccggttcgcgtgaagaatacgcgtcgaaggaaaacaagatgaagagttggcccgacgacgacgtgatcctctacgacggcgtctgcatcttctgctcgcgctgggtccgcttcgtcgtcgcccgcgacacggcgcgccgctttcgtttcacgccgatccagtcggattatggcacccggcttgccaagaccttcggcatcgaccctgaggatcccgacaccaacgccgtggtccatggcggcatcgcctggatgatcctatatgtgaagcttttgagagaggaaattgtttttccacatacctcgaaagggattcttagagtacccaaaaaggtgtgcttcttcacttgactaaccacaagagggtgatcttgacaacgaaaaacttgaggaagagaaaatttactagtgttagttagtgcttcatgtgcaaagaatccggggatgacgtaacctacttttatgttgtcgagtagcatcttcgtaatggggggagctgatgagatagtttggttttgagtgggtaatgccgagaactatgaaagagacaatttttaacttggcttgagaagacggagtaggagatgtagggcatgtgaagctgcacttttagcagtgatgtggaccatatggaggtgtaaccacctcccaggaacccggacgctgtcttgctttcgacctccagcttggcgccgccaggcaagcggttgcgggtgtcggtgtcgatgtacatcaagtcggcgagtacgctgtaggggccccgacgcgcctcgcccatcagcatcaccgacatatcgaccgtcttggcgatgtcggaaaagtcagactttatgaactgggttccggtgctgctatggcctacgtggcctcggatgccggcgccccatacataaggtccgccgttgaaggtccagtcatcgttgtcggccgccatggcgggcccagcgacaagaaaggcgccggccagcagggccaggcgccgtaaagatgagtcagtcatgctttctctcgatcgctatcgtctggcttttatgattgtgcttgcccctttattagaagagtttatctttcgtgccggattgcgcaaagccacatacagtttgctgatcgggccgcttatcgtctgtgcttctctggatatcggcatcattgttctggtgctggctgtattgctcatgctgctggctcttgccggatggctccgcttgcgctggatgcaatctgcagcggggattcgctttgcacgcggtcgtgcctttattcatcgctattcgtatattttctggatgtatgccattggctttggtctggtgcatatacggaatttttattcttcgacagggcgtgattatttattggtgctggccatcagctcgcaattatcgtgtgggattgtcggcctcgcccggaaacccaacgccaatcaactggaagtgattgtggttactacaggtgggcagacgattcctgaaatgggtattcgaaccatcgctgaaaatctcggaggacctggtgggttcatctcttctgccaatccgaacatcgtccagggcgtgcggggtggatggcaggtagcactaagtaactatgctatagctcctggcccaggacatacagctagcgcactttttcttatggatggagcgttggctaatgactatctatatcgaaacgcagtgcccaatcatccagaattcaacacgatgaatactgatatcacgatgggcaaccacaatattaacaacgcaggaagtatcacagcgtcaggcaacgacctgaactacaacgtgatgttctcccagcgtggtgtgtacaacctgtgccacaccctgcaagacatccgtgattccgagcgtcgcgtcagtgccaaccgcctcaacggcgtggacggcgagttgctcaacgccaaacaagtggctgacgagatcccgtatctcgattgctcgaaaaacacccgctacccggtactcggcgccaccgtgcaacgtcgcggcggcgtggcccgtcacgatgccgtggcctggggttttgcccgtgccgctgacgcactgggcgtggacttgatccagcagaccgaagtgatcggctttcgcaaggaaaacggcgtgtgcatcggcgtggaaaccaacaagggctttatcggcgccaagccctatttattttcataccaggctaaaaaatgactattgaagatacagtaattaagttaattggctcattaaaggatcctttgcttgatcttactggcaaagaaatgaatctacagtacaaaataacaactagcaaccaggctatgcatgttgtcttgactgccggatatcctacctctttgttagaaacgagctataaaccaatagtacagaaaatagttcaagatgaattccccaattaccaagttactatttctattcagcagttcataaaagcgcataaaactcagttgacaggcaaagccctgcgaggagtaaagaatactatcgcagtggcctctggcaaaggaggggtcggaaagtctactgtcacagtaaatactatcaggtcattaacagtgacttgctctaccattgagctacaacaacaaatatttacggaaaaagtgagactcgaactcacaaggttattcaccagatacgtagcaagtacccttcttaccaattagaactatttttcctttaactcacttttatgagaagttagttcttttatttatgggtctgaagggatttgaacccttatcctatcgcttaaaaggcgaaagctctaaccattgagctacatcccctttaaacaataccctcatcaaaaaaatggtaaaaaaaattgtgtaattaggcaatttccagttatttaaaaaattagcgaagagataatccctttggttaaaaaattaactaaatctatctaaacaagcccggtcgtgccgtagcctagcgacgcactcgcttcagcggaaggagcttcttccaagtaaacatccaaatccacctggttatttgcttcgggtaccggtgtggtttttacgttgatattttttaaatagcttaaaagtcttaattgccgttcagattctttaatattatgcagtgataacaatgccccttcttgctggcggatgatattacgcaggacataatccccagtctttgtgttgccgtggaaattaatgcggcgcacgtatacatggcggcctggatcgatcacaaaagtactccaaactgttttattttgttcatcaatctgcggttcggcattgatggcagggaaaccaaaacccacatcccccaaggccttgtttctcgagaagagatgggaaacatgctcaatatcatttgattgaatagttgacccagccccttgttgtttgaagaaaccctccacttcaattggtattttttcacgaaaagcagacatgagataagaaatccagtgtttcactaagatttcgaatagcggtcccgaattcaagttgattctatttcgactcttcctcagagaaagacgatcaaacaattcccaatcatggtccttgcggatcggatcatccatataatatacaaaaagaaactccagatatttgagatctttctctttgaataagatctcaattccagcgacggtctcattagatatcttacaactagaatccctcttttttccgatccagttcatttaaaaccatcaaagggtagatgaaataaccaattactggcaatgcatgggtggtatgcactacttagttgtagacgatatccaaaccattcaaatgaaaaacacaaagcggcgaaaaagttttcaatattaattaattggcaaagagcgtttgcgttaaggaaataatttcaaagaatggaaaggaatatggcacaagtagtactatattcccaaaaacattacacttaagtataataggaaaaacgataaacaacattagcgaacaaagaatgattcgataacaaaggacattaaaaaatgaagcgaatacgtattaattcacaaacacaataacaaccatgacgacaaatgtgaatatatacaaagacatataagaaggatctccgccgccgatttcgcgttgtggcgatcgtgatatatgcgcatcagttcgatgaagctgctgatcgagtaggccggatcgtcgaaccgggcgaagccgtgccggttggcgccggtctgcccaggccattcaccggtgatgtttggacccttgatggcgacccagttgttgttgcggagggcgaagggagcattgtccggctcgtatgtcacgggtccgaatgcattcccgccctgccgggcaagcaagcccctggcggtttgttctccagcggttcgttcatcggcggatcgttgctgcgctcccggcattgcagcgtcctgctgggccagggcagcgccggcagaaaaaagcgtcagggccatcaccgcacagtagtagtgacagttccagcttcaggctcaactacctcaacagtgccaggaacagtatcagttgcggaagcaagcgttgtgttaaatggtgtagttccagagtaaattgtagtagtaacagttccagctgctgtatccactacttcaacagtgcctgaaacagtaccactggctgtagcaagtgtggtagtgtactcttgagtaccagaatagacagtagtagtgacagttccagcttcaggctcaactacctcaacagagccaggaacagtatcagttgcggaagcaagcgttgtgttaaatggtgtagttccagagtaaattgtagtagtaacagttcatacagcatcttcttgctgttcagcttgactgtagtagtccttcctgagtggcaacttgaatgccctcaaggttcctcctgcacctgtcttgtagactgggatgttgatgtcaccttggctgatcatgccaccatatttggtgatctgcacatcccatcccttctcaatgagagttccttgactgagtaggttggctggtgcatcttccataagtaccacattgtgtagagtcaaacagtgttgactttggggtaacttcatggtaaccttgcctccatattcagagactgtagcaccaccagaggctgtcctgaatctcttggggaaactcagcctctccacagtgactgggtcaccgttggaatctgtcttagtttcagtagtggtgtaagtagtcaaagttgcagggaaagtggatgtagtggtggacaaagcaccattagcatcggtagtcacaatcacaattgcagtatcagtgactgggtcaccgttggaatctgtcttagtttcagtagtggtgtaagtagtcaaagttgcagggaaagtggatgtagtggtggacaaagcaccattagcatcggtagtcacaatcacaattgcatatagctggacccctcaagccagacatcaatgggcacatctactatgtgacctttgttgatgacttgacagggctgacctgcattggaggtctcaagacggagacagcaacggatgtccttggatgtgttgtgaagtaacaactagatccacaaagattggttacttgctgggtctaggcaatagcaatggtctattgctagtgctgatcttgccttgttgtgaaggggaatcaatgttgcttgcataaaagtttggatttcctttccatcccccagaggtttgatgaaaaggtcaagcgcttggacggaaacacgtcgccaaatcgttcggtttggctctttctgcgccagtattatatatgtgcgttggatttcttttccatcccccagaggtttgatgaaaaggtcaagcgcttggacggaaacacgtcgccaaatcgttcggtttggctctttttgcgccagtattatatatgtgcgttggatttcctttccatcccccatgggggatggaaaggaaatccaacgcacatatataatactggcgcaaaaagagccaaaccgaacgatttggcgacgtgtttccgtccaagcgcttgaccttttcatcaaacctctgggggatggaaaggaaatccaacgcacatatataatactcgcgcaaaaagagccaaaccacatgccatgattggctcatggatgcaggaagcaatctcaaccacaaagtaaacagaggaagcaaacaggaagcaaacaggaggcaaacccatggaacatgctagaagatctatttttgccactgaggcatgattgccaaagggtggcaaatctgaaagacagcaaagccaagacagcaaagccaagacagcaaagccaagacagcaaagccaagacagcaaagccaagacagcaaagccaagacagcaaagccaagacagcaaagccaagacagcaaagccaagacagcaaagccaaaaaaaaaaaaaaaaaaaaaaaaaaaaaaaaaaaaaaaaaaaaaaaaaaaaaaaaaaaaaaaaaaaaaaaaaaaaaaaaaaaaaaaaaaaaaaaaaaaaaaaaaaaaaaaaaaaaaaaaaaaaaaaaacccccccccccccccccccccccccccccccccccccccccccccccccccccccccccccccccccccccccccccccccccccccccccccccccccccccccccccccccccccccccccccccc
